(19) United States
(12) Patent Application Publication
(10) Pub. No.: US 2017/0283880 A1
(43) Pub. Date: Oct. 5, 2017

(54) METHODS AND NUCLEIC ACIDS FOR ANALYSES OF COLORECTAL CELL PROLIFERATIVE DISORDERS

(71) Applicant: EPIGENOMICS AG, Berlin (DE)

(72) Inventors: Catherine Lofton-Day, Seattle, WA (US); Fabian Model, Berlin (DE); Andrew Sledziewski, Shoreline, WA (US); Tamas Rujan, Berlin (DE); Joern Lewin, Berlin (DE); Juergen Distler, Berlin (DE)

(21) Appl. No.: 15/477,858

(22) Filed: Apr. 3, 2017

Related U.S. Application Data
(63) Continuation of application No. 10/562,383, filed on Jun. 13, 2007, now abandoned.
Application No. 10/562,383 is a continuation of application No. 10/603,138, filed on Jun. 23, 2003, now abandoned.
Application No. 10/603,138 is a continuation of application No. 10/602,494, filed on Jun. 23, 2003, now abandoned.

(30) Foreign Application Priority Data
Feb. 27, 2004 (EP) 04090072.2
May 6, 2004 (EP) 04090175.3

(51) Int. Cl. C12Q 1/68

(52) U.S. Cl. CPC C12Q 1/6886; C12Q 2600/156; C12Q 2600/16; C12Q 2600/154; C12Q 2600/112

(57) ABSTRACT

The invention provides methods, nucleic acids and kits for detecting, or for detecting and distinguishing between or among colorectal cell proliferative disorders. The invention discloses genomic sequences the methylation patterns of which have utility for the improved detection of and differentiation between said class of disorders, thereby enabling the improved diagnosis and treatment of patients.

### CROSS-REFERENCE TO RELATED APPLICATIONS

[0001] This application claims the benefit of priority to: U.S. patent application Ser. No. 10/679,062, filed 3 Oct. 2003, which is a continuation-in-part of U.S. patent application Ser. No. 10/603,138, filed 23 Jun. 2003; to U.S. application Ser. No. 10/602,494, filed 23 Jun. 2003; to European Patent Application No. EP 04090175.3, filed 6 May 2004; and to European Patent Application No. EP 04090072.2, filed 27 Feb. 2004; all of which are incorporated herein by reference in their entirety.

### FIELD OF THE INVENTION

[0002] The present invention relates to genomic DNA sequences that exhibit altered CpG methylation patterns in disease states relative to normal. Particular embodiments provide methods, nucleic acids, nucleic acid arrays and kits useful for detecting, or for detecting and differentiating between or among colorectal cell proliferative disorders.

### SEQUENCE LISTING

[0003] A Sequence Listing, pursuant to 37 C.F.R. §1.52 (e)(5), has been provided on compact disc (1 of 1) as a 4.17 MB text file, entitled “Sequence Listing for 47675-75.txt,” and which is incorporated by reference herein in its entirety.

### BACKGROUND

[0004] The etiology of pathogenic states is known to involve modified methylation patterns of individual genes or of the genome. 5-methylcytosine, in the context of CpG dinucleotide sequences, is the most frequent covalently modified base in the DNA of eukaryotic cells, and plays a role in the regulation of transcription, genetic imprinting, and tumorigenesis. The identification and quantification of 5-methylcytosine sites in a specific specimen, or between or among a plurality of specimens, is thus of considerable interest, not only in research, but particularly for the molecular diagnoses of various diseases.

[0005] Correlation of aberrant DNA methylation with cancer. Aberrant DNA methylation within CpG ‘islands’ is characterized by hyper- or hypomethylation of CpG dinucleotide sequences leading to abrogation or overexpression of a broad spectrum of genes, and is among the earliest and most common alterations found in, and correlated with human malignancies. Additionally, abnormal methylation has been shown to occur in CpG-rich regulatory elements in intronic and coding parts of genes for certain tumors. In colon cancer, for example, aberrant DNA methylation constitutes one of the most prominent alterations and inactivates many tumor suppressor genes such as p14ARF, p16INK4a, THBS1, MINT2, and MINT31 and DNA mismatch repair genes such as hMLH1.

[0006] In contrast to the specific hypermethylation of tumor suppressor genes, an overall hypomethylation of DNA can be observed in tumor cells. This decrease in global methylation can be detected early, far before the development of frank tumor formation. A correlation between hypomethylation and increased gene expression has been determined for many oncogenes.

[0007] In the United States the annual incidence of colorectal cancer is approximately 150,000, with 56,600 individuals dying form colorectal cancer each year. The lifetime risk of colorectal cancer in the general population is about 5 to 6 percent. Despite intensive efforts in recent years in screening and early detection of colon cancer, until today most cases are diagnosed in an advanced stage with regional or distant metastasis. While the therapeutic options include surgery and adjuvant or palliative chemotherapy, most patients die from progression of their cancer within a few months. Identifying the molecular changes that underlie the development of colon cancer may help to develop new monitoring, screening, diagnostic and therapeutic options that could improve the overall poor prognosis of these patients.

[0008] The current guidelines for colorectal screening according to the American Cancer Society utilizes one of five different options for screening in average risk individuals 50 years of age or older. These options include 1) fecal occult blood test (FOBT) annually, 2) flexible sigmoidoscopy every five years, 3) annual FPBT plus flexible sigmoidoscopy every five years, 4) double contrast barium enema (DCBE) every five years or 5) colonoscopy every ten years. Even though these testing procedures are well accepted by the medical community, the implementation of widespread screening for colorectal cancer has not been realized. Patient compliance is a major factor for limited use due to the discomfort or inconvenience associated with the procedures. FOBT testing, although a non-invasive procedure, requires dietary and other restrictions 3-5 days prior to testing. Sensitivity levels for this test are also very low for colorectal adenocarcinoma with wide variability depending on the trial. Sensitivity measurements for detection of adenomas is even less since most adenomas do not bleed. In contrast, sensitivity for more invasive procedures such as sigmoidoscopy and colonoscopy are quite high because of direct visualization of the lumen of the colon. No randomized trials have evaluated the efficacy of these techniques, however, using data from case-control studies and data from the National Polyp Study (U.S.) it has been shown that removal of adenomatous polyps results in a 76-90% reduction in CRC incidence. Sigmoidoscopy has the limitation of only visualizing the left side of the colon leaving lesions in the right colon undetected. Both scoping procedures are expensive, require cathartic preparation and have increased risk of morbidity and mortality. Improved tests with increased sensitivity, specificity, ease of use and decreased costs are clearly needed before general widespread screening for colorectal cancer becomes routine.

[0009] Early colorectal cancer detection is generally based on the fecal occult blood test (FOBT) performed annually on asymptomatic individuals. Current recommendations adapted by several healthcare organizations, including the American Cancer Society, call for fecal occult blood testing beginning at age 50, repeated annually until such time as the patient would no longer benefit from screening. A positive FOBT leads to colonoscopic examination of the bowel; an expensive and invasive procedure, with a serious complication rate of one per 5,000 examinations. Only 12% of patients with heme positive stool are diagnosed with cancer or large polyps at the time of colonoscopy. A number of studies show that FOBT screening does not improve cancer-related mortality or overall survival. Compliance with occult blood testing has been poor; less than 20 percent of the population is offered or completes FOBT as recommended. If FOBT is properly done, the patient collects a fecal sample from three consecutive bowel movements. Samples are obtained while the patient adheres to dietary guidelines and avoids medications known to induce occult gastrointestinal bleeding. In reality, physicians frequently fail to instruct patients properly, patients frequently fail to adhere to protocol, and some patients find the task of collecting fecal samples difficult or unpleasant, hence compliance with annual occult blood testing is poor. If testing sensitivity and specificity can be improved over current methods, the frequency of testing could be reduced, collection of consecutive samples would be eliminated, dietary and medication schedule modifications would be eliminated, and patient compliance would be enhanced. Compounding the problem of compliance, the sensitivity and specificity of FOBT to detect colon cancer is poor. Poor test specificity leads to unnecessary colonoscopy, adding considerable expense to colon cancer screening.

[0010] Specificity of the FOBT has been calculated at best to be 96%, with a sensitivity of 43% (adenomas) and 50% (colorectal carcinoma). Sensitivity can be improved using an immunoassay FOBT such as that produced under the tradename ‘InSure™’, with an improved sensitivity of 77% (adenomas) and 88.9% (colorectal carcinoma.

[0011] Molecular disease markers offer several advantages over other types of markers, one advantage being that even samples of very small sizes and/or samples whose tissue architecture has not been maintained can be analyzed quite efficiently. Within the last decade a number of genes have been shown to be differentially expressed between normal and colon carcinomas. However, no single or combination of marker has been shown to be sufficient for the diagnosis of colon carcinomas. High-dimensional mRNA based approaches have recently been shown to be able to provide a better means to distinguish between different tumor types and benign and malignant lesions. However its application as a routine diagnostic tool in a clinical environment is impeded by the extreme instability of mRNA, the rapidly occurring expression changes following certain triggers (e.g., sample collection), and, most importantly, the large amount of mRNA needed for analysis (Lipshutz, R. J. et al., Nature Genetics 21:20-24, 1999; Bowtell, D. D. L. Nature genetics suppl. 21:25-32, 1999), which often cannot be obtained from a routine biopsy.

[0012] The use of biological markers to further improve sensitivity and specificity of FOBT has been suggested, examples of such tests include the PreGen-Plus™ stool analysis assay available from EXACT Sciences which has a sensitivity of 20% (adenoma) and 52% (colorectal carcinoma) and a specificity of 95% in both cases. This test assays for the presence of 23 DNA mutations associated with the development of colon neoplasms. The use of DNA methylation as colon cancer markers is known. For example Sabbioni et al. (Molecular Diagnosis 7:201-207, 2003) detected hypermethylation of a panel of genes consisting TPEF, HIC1, DAPK and MGMT in peripheral blood in 98% of colon carcinoma patients. However, this does provide a suitable basis for a commercially marketable test, as the specificity of such a test must also be sufficiently high.

[0013] The current model of colorectal pathogenesis favours a stepwise progression of adenomas, which includes the development of dysplasia and finally signs of invasive cancer. The molecular changes underlying this adenoma-carcinoma sequence include genetic and epigenetic alterations of tumor suppressor genes (APC, p53, DCC), the activation of oncogenes (K-ras) and the inactivation of DNA mismatch repair genes. Recently, further molecular changes and genetic defects have been revealed. Thus, activation of the Wnt signalling pathway not only includes mutations of the APC gene, but may also result from β-catenin mutations. Furthermore, alterations in the TGF-β signalling pathway together with its signal transducers SMAD4 and SMAD2 have been linked to the development of colon cancer.

[0014] Despite recent progress in the understanding of the pathogenesis of adenomas and carcinomas of the colon and their genetic and molecular changes, the genetic and epigenetic changes underlying the development of metastasis are less well understood. It is, however, generally well accepted that the process of invasion and proteolysis of the extracellular matrix, as well as infiltration of the vascular basement membrane involve adhesive proteins, such as members of the family of integrin receptors, the cadherins, the immunoglobulin superfamily, the laminin binding protein and the CD44 receptor. Apart from adhesion, the process of metastasis formation also includes the induction and regulation of angiogenesis (VEGF, bFGF), the induction of cell proliferation (EGF, HGF, IGF) and the activation of proteolytic enzymes (MMPs, TIMPs, uPAR), as well as the inhibition of apoptosis (Bcl-2, Bcl-X). More recently other groups have compared the genetic and molecular changes in metastatic lesions to the changes found in primary colorectal cancers. Thus, Kleeff et al. reported the loss of DOC-2, a candidate tumor suppressor gene, both in primary and metastatic colorectal cancer. Furthermore, Zauber et al. reported that in their series of 42 colorectal cancers Ki-ras mutations in the primary cancers were identical in all of the 42 paired primary and synchronous metastatic lesions. Similarly loss of heterozygosity at the APC locus was identical for 39 paired carcinomas and synchronous metastasis. The authors concluded that for Ki-ras and APC genes the genetic changes in metastasis are identical to the primary colorectal cancer. However, other groups have found genetic and molecular changes in metastatic colon cancers, that are not present in the primary cancers. Thus, the development of LOH of chromosome 3p in colorectal metastasis has been reported. In addition, using comparative genomic hybridization several alterations were found in liver metastasis that were unique to metastastic lesions (−9q, −11q, and −17q).

[0015] Apart from mutations aberrant methylation of CpG islands has been shown to lead to the transcriptional silencing of certain genes that have been previously linked to the pathogenesis of various cancers. CpG islands are short sequences which are rich in CpG dinucleotides and can usually be found in the 5′ region of approximately 50% of all human genes. Methylation of the cytosines in these islands leads to the loss of gene expression and has been reported in the inactivation of the X chromosome and genomic imprinting.

[0016] Recently several groups have also analysed the methylation of various genes in colorectal cancer and reported the transcriptional silencing by promoter methylation for p16INK4, p14ARF, p15INK4b, MGMT, hMLH1, GSTP1, DAPK, CDH1, TIMP-3 and APC among others. Thus apart from mutational inactivation of certain genes, the hypermethylation of these genes also contributes significantly to the pathogenesis of this disease.

[0017] In recent years several genes that are methylated in colon cancer have been identified by MS-APPCR. This group of genes, among others, includes TPEF/HPP1 which is frequently methylated in colon cancers and which was independently identified by two different groups using the MS-APPCR method (see, e.g., Young J, Biden K G, Simms L A, Huggard P, Karamatic R, Eyre H J, Sutherland G R, Herath N, Barker M, Anderson G J, Fitzpatrick D R, Ramm G A, Jass J R, Leggett B A. HPP1: a transmembrane protein-encoding gene commonly methylated in colorectal polyps and cancers. Proc Natl Acad Sci USA 98:265-270, 2001).

[0018] Multifactorial Approach.

[0019] Cancer diagnostics has traditionally relied upon the detection of single molecular markers (e.g., gene mutations, elevated PSA levels). Unfortunately, cancer is a disease state in which single markers have typically failed to detect or differentiate many forms of the disease. Thus, assays that recognize only a single marker have been shown to be of limited predictive value. A fundamental aspect of this invention is that methylation-based cancer diagnostics and the screening, diagnosis, and therapeutic monitoring of such diseases will provide significant improvements over the state-of-the-art that uses single marker analyses by the use of a selection of multiple markers. The multiplexed analytical approach is particularly well suited for cancer diagnostics since cancer is not a simple disease, this multi-factorial “panel” approach is consistent with the heterogeneous nature of cancer, both cytologically and clinically.

[0020] Key to the successful implementation of a panel approach to methylation based diagnostic tests is the design and development of optimized panels of markers that can characterize and distinguish disease states.

[0021] Development of medical tests. Two key evaluative measures of any medical screening or diagnostic test are its sensitivity and specificity, which measure how well the test performs to accurately detect all affected individuals without exception, and without falsely including individuals who do not have the target disease (predicitive value). Historically, many diagnostic tests have been criticized due to poor sensitivity and specificity.

[0022] A true positive (TP) result is where the test is positive and the condition is present. A false positive (FP) result is where the test is positive but the condition is not present. A true negative (TN) result is where the test is negative and the condition is not present. A false negative (FN) result is where the test is negative but the condition is not present. In this context: Sensitivity=TP/(TP+FN); Specificity=TN/(FP+TN); and Predictive value=TP/(TP+FP).

[0023] Sensitivity is a measure of a test's ability to correctly detect the target disease in an individual being tested. A test having poor sensitivity produces a high rate of false negatives, i.e., individuals who have the disease but are falsely identified as being free of that particular disease. The potential danger of a false negative is that the diseased individual will remain undiagnosed and untreated for some period of time, during which the disease may progress to a later stage wherein treatments, if any, may be less effective. An example of a test that has low sensitivity is a protein-based blood test for HIV. This type of test exhibits poor sensitivity because it fails to detect the presence of the virus until the disease is well established and the virus has invaded the bloodstream in substantial numbers. In contrast, an example of a test that has high sensitivity is viral-load detection using the polymerase chain reaction (PCR). High sensitivity is achieved because this type of test can detect very s mall quantities of the virus. High sensitivity is particularly important when the consequences of missing a diagnosis are high.

[0024] Specificity, on the other hand, is a measure of a test's ability to identify accurately patients who are free of the disease state. A test having poor specificity produces a high rate of false positives, i.e., individuals who are falsely identified as having the disease. A drawback of false positives is that they force patients to undergo unnecessary medical procedures treatments with their attendant risks, emotional and financial stresses, and which could have adverse effects on the patient's health. A feature of diseases which makes it difficult to develop diagnostic tests with high specificity is that disease mechanisms, particularly in cancer, often involve a plurality of genes and proteins. Additionally, certain proteins may be elevated for reasons unrelated to a disease state. n example of a test that has high specificity is a gene-based test that can detect a p53 mutation. Specificity is important when the cost or risk associated with further diagnostic procedures or further medical intervention are very high.

[0025] Pronounced Need in the Art.

[0026] If colon cancer screening specificity can be increased, the problem of false positive test results leading to unnecessary colonoscopic examination would be reduced leading to cost savings and improved safety.

[0027] In view of the incidence of colon cancer and disadvantages associated with current colorectal cell proliferative disorder screening methods there is a substantial need in the art for improved methods for the early detection of colon cell proliferative disorders, in particular colon cancer, to be used in addition to or as a substitute for currently available tests.

### SUMMARY OF THE INVENTION

[0028] Various aspects of the present invention provide efficient and unique panels of genes, whereby methylation analysis of one or a combination of the members of the panel enables the detection of cell proliferative disorders of the prostate with a particularly high sensitivity, specificity and/or predictive value. The inventive colorectal cancer testing methods have particular utility for the screening of at-risk populations. The inventive methods have advantages over prior art methods (including the industry standard FOBT), because of improved sensitivity, specificity and likely patient compliance.

[0029] The present invention provides novel methods for detecting or distinguishing between colorectal cell proliferative disorders. Said methods are most preferably utilised for detecting or detecting and distinguishing between one or more of the following: colorectal carcinoma, colon adenoma, inflammatory colon tissue, grade 2 dysplasia colon adenomas less than 1 cm, grade 3 dysplasia colon adenomas larger than 1 cm, normal colon tissue, non-colon normal tissue, body fluids and non-colon cancer tissue.

[0030] In a further embodiment of the invention the method according to the invention may be used for the detection of aerodigestive cell proliferative disorders.

[0031] In one embodiment the invention provides a method for detecting and/or for detecting and distinguishing between or among colorectal cell proliferative disorders in a subject. Said method comprises the following steps: i) contacting genomic DNA isolated from blood plasma, blood serum, whole blood, isolated blood cells, cells isolated from the blood obtained from the subject with at least one reagent, or series of reagents that distinguishes between methylated and non-methylated CpG dinucleotides within at least one target region of the genomic DNA, wherein the nucleotide sequence of said target region comprises at least one CpG dinucleotide sequence; and ii) detecting, or detecting and distinguishing between or among colorectal cell proliferative disorders afforded with a sensitivity of greater than or equal to 80% and a specificity of greater than or equal to 80%.

[0032] Preferably, the sensitivity is from about 75% to about 96%, or from about 80% to about 90%, or from about 80% to about 85%. Preferably, the specificity is from about 75% to about 96%, or from about 80% to about 90%, or from about 80% to about 85%.

[0033] The method is novel as no methods currently exist that enable the detection of colon cancer by analysis of bodily fluids, with a sensitivity and specificity high enough for use in a commercially available and regulatory body approved assay. Current methods used to detect and diagnose colorectal cell proliferative disorders include colonoscopy, sigmoidoscopy, and fecal occult blood colon cancer. In comparison to these methods, the disclosed invention is much less invasive than colonoscopy, and as, if not more sensitive than sigmoidoscopy and FOBT. The development of a body fluid assay represents a clear technical advantage over current methods known in the art in that it is anticipated that patient compliance for a single body fluid based test will be higher than the triplicate analysis of stool currently recommended for FOBT.

[0034] A particular embodiment the method comprises the use of one or more genes or genomic sequences selected from the group consisting of: SEQ ID NOS:1-3, 14, 16, 21, 22, 23, 44-46, 48, 50, 59-64, COX7B, CST5, EYA3, FTH1, RNF4, SOX21, RNF4, ALX 4, ONC2, NGFR, DLX-5, HVIAAT, BTF3 Homolog 1, ADCY9, BCL-5, BCOR, TAFII28, HOMEOBOX PROTEIN SIX6, GSK-3 BETA, ELK-L, HLA-F, TGFBR2, AR, RNF30 and DUX4 as markers for the differentiation, detection and distinguishing of colorectal cell proliferative disorders.

[0035] Said use of the gene may be enabled by means of any analysis of the expression of the gene, by means of mRNA expression analysis or protein expression analysis. However, in the most preferred embodiment of the invention, the detection, differentiation and distinguishing of colorectal cell proliferative disorders is enabled by means of analysis of the methylation status of one or more genes or genomic sequences selected from the group consisting of SEQ ID NOS:1-3, 14, 16, 21, 22, 23, 44-46, 48, 50, 59-64, COX7B, CST5, EYA3, FTH1, RNF4, SOX 21, RNF4, ALX 4, ONC2, NGFR, DLX-5, HVIAAT, BTF3 Homolog 1, ADCY9, BCL-5, BCOR, TAFII28, HOMEOBOX PROTEIN SIX6, GSK-3 BETA, ELK-L, HLA-F, TGFBR2, AR, RNF30, DUX4, and their promoter or regulatory elements.

[0036] The invention provides a method for the analysis of biological samples for features associated with the development of colorectal cell proliferative disorders, the method characterised in that at least one nucleic acid, or a fragment thereof, from the group consisting of SEQ ID NO:1 to SEQ ID NO:535 is/are contacted with a reagent or series of reagents capable of distinguishing between methylated and non methylated CpG dinucleotides within the genomic sequence, or sequences of interest.

[0037] The present invention provides a method for ascertaining genetic and/or epigenetic parameters of genomic DNA. The method has utility for the improved diagnosis, treatment and monitoring of colorectal cell proliferative disorders, more specifically by enabling the improved identification of and differentiation between subclasses of said disorder. The invention presents improvements over the state of the art in that it enables a highly specific classification of colorectal cell proliferative disorders, thereby allowing for improved and informed treatment of patients.

[0038] Preferably, the source of the test sample is selected from the group consisting of cells or cell lines, histological slides, biopsies, paraffin-embedded tissue, bodily fluids, ejaculate, stool, urine, blood, and combinations thereof. Preferably, the source is selected from the group consisting of stool, blood plasma, blood serum, whole blood, isolated blood cells, cells isolated from the blood obtained from the subject.

[0039] Specifically, the present invention provides a method for detecting colorectal cell proliferative disorders, comprising: obtaining a biological sample comprising genomic nucleic acid(s); contacting the nucleic acid(s), or a fragment thereof, with one reagent or a plurality of reagents sufficient for distinguishing between methylated and non methylated CpG dinucleotide sequences within a target sequence of the subject nucleic acid, wherein the target sequence comprises, or hybridizes under stringent conditions to, a sequence comprising at least 16 contiguous nucleotides of SEQ ID NOS:1 to 64, said contiguous nucleotides comprising at least one CpG dinucleotide sequence; and determining, based at least in part on said distinguishing, the methylation state of at least one target CpG dinucleotide sequence, or an average, or a value reflecting an average methylation state of a plurality of target CpG dinucleotide sequences. Preferably, distinguishing between methylated and non methylated CpG dinucleotide sequences within the target sequence comprises methylation state-dependent conversion or non-conversion of at least one such CpG dinucleotide sequence to the corresponding converted or non-converted dinucleotide sequence within a sequence selected from the group consisting of SEQ ID NOS:304 to SEQ ID NO:535 and SEQ ID NOS:65 to SEQ ID NO:88, and contiguous regions thereof corresponding to the target sequence.

[0040] Additional embodiments provide a method for the detection of colorectal cell proliferative disorders, comprising: obtaining a biological sample having subject genomic DNA; extracting the genomic DNA; treating the genomic DNA, or a fragment t hereof, with one or more reagents to convert 5-position unmethylated cytosine bases to uracil or to another base that is detectably dissimilar to cytosine in terms of hybridization properties; contacting the treated genomic DNA, or the treated fragment thereof, with an amplification enzyme and at least two primers comprising, in each case a contiguous sequence at least 9 nucleotides in length that is complementary to, or hybridizes under moderately stringent or stringent conditions to a sequence selected from the group consisting SEQ ID NOS:304 to SEQ ID NO:535 and SEQ ID NOS:65 to SEQ ID NO:88, and complements thereof, wherein the treated DNA or the fragment thereof is either amplified to produce an amplificate, or is not amplified; and determining, based on a presence or absence of, or on a property of said amplificate, the methylation state of at least one CpG dinucleotide sequence selected from the group consisting of SEQ ID NOS:1 to SEQ ID NO:64, or an average, or a value reflecting an average methylation state of a plurality of CpG dinucleotide sequences thereof. Preferably, at least one such hybridizing nucleic acid molecule or peptide nucleic acid molecule is bound to a solid phase. Preferably, determining comprises use of at least one method selected from the group consisting of: hybridizing at least one nucleic acid molecule comprising a contiguous sequence at least 9 nucleotides in length that is complementary to, or hybridizes under moderately stringent or stringent conditions to a sequence selected from the group consisting of SEQ ID NOS:304 to SEQ ID NO:535 and SEQ ID NOS:65 to SEQ ID NO:88, and complements thereof; hybridizing at least one nucleic acid molecule, bound to a solid phase, comprising a contiguous sequence at least 9 nucleotides in length that is complementary to, or hybridizes under moderately stringent or stringent conditions to a sequence selected from the group consisting of SEQ ID NOS:304 to SEQ ID NO:535 and SEQ ID NOS:65 to SEQ ID NO:88, and complements thereof; hybridizing at least one nucleic acid molecule comprising a contiguous sequence at least 9 nucleotides in length that is complementary to, or hybridizes under moderately stringent or stringent conditions to a sequence selected from the group consisting of SEQ ID NOS:304 to SEQ ID NO:535 and SEQ ID NOS:65 to SEQ ID NO:88, and complements thereof, and extending at least one such hybridized nucleic acid molecule by at least one nucleotide base; and sequencing of the amplificate.

[0041] Further embodiments provide a method for the analysis of colorectal cell proliferative disorders, comprising: obtaining a biological sample having subject genomic DNA; extracting the genomic DNA; contacting the genomic DNA, or a fragment thereof, comprising one or more sequences selected from the group consisting of SEQ ID NOS:1 to SEQ ID NO:64 or a sequence that hybridizes under stringent conditions thereto, with one or more methylation-sensitive restriction enzymes, wherein the genomic DNA is either digested thereby to produce digestion fragments, or is not digested thereby; and determining, based on a presence or absence of, or on property of at least one such fragment, the methylation state of at least one CpG dinucleotide sequence of one or more sequences selected from the group consisting of SEQ ID NOS:1 to SEQ ID NO:64, or an average, or a value reflecting an average methylation state of a plurality of CpG dinucleotide sequences thereof. Preferably, the digested or undigested genomic DNA is amplified prior to said determining.

[0042] Additional embodiments provide novel genomic and chemically modified nucleic acid sequences, as well as oligonucleotides and/or PNA-oligomers for analysis of cytosine methylation patterns within sequences from the group consisting of SEQ ID NOS:1 to SEQ ID NO:64.

### BRIEF DESCRIPTION OF THE DRAWINGS

[0043] FIGS. 1, 5, 9, 13, 16, 20, 24, 28 and 32 show ranked matrices of data obtained according to EXAMPLES 1 and 2, and according to CpG methylation differences between the two classes of tissues, using a suitable algorithm. The figures are shown in greyscale, wherein the most significant CpG positions are at the bottom of the matrix with significance decreasing towards the top. Black indicates total methylation at a given CpG position, white represents no methylation at the particular position, with degrees of methylation represented in grey, from light (low proportion of methylation) to dark (high proportion of methylation). Each row represents one specific CpG position within a gene and each column shows the methylation profile for the different CpGs for one sample. The p-values for the individual CpG positions are shown on the right side. The p-values are the probabilities that the observed distribution occurred by chance in the data set.

[0044] FIGS. 2, 6, 10, 17, 21, 25, 29 and 33 show the uncorrected multivariate LogReg test results for each comparison. Each individual genomic region of interest is represented as a point, the dotted line represents the cut off point for the 25% false discovery rate.

[0045] FIGS. 3, 7, 11, 14, 18, 22, 26, 30 and 34 show ranked matrices of data, obtained according to EXAMPLES 1 and 2, of the accuracy of the genewise linear support vector machine cross validations between the two classes of tissues, for the best performing markers. The figures are shown in greyscale, wherein the most significant CpG positions are at the bottom of the matrix with significance decreasing towards the top. Black indicates total methylation at a given CpG position, white represents no methylation at the particular position, with degrees of methylation represented in grey, from light (low proportion of methylation) to dark (high proportion of methylation). Each row represents one specific CpG position within a gene and each column shows the methylation profile for the different CpGs for one sample. Accuracy values for each individual genomic region of interest are shown on the right side.

[0046] FIGS. 4, 8, 12, 15, 18, 23, 27, 31 and 35 show the accuracy of the genewise linear support vector machine cross validation for all genomic regions of each classification. The accuracy of each genomic region is represented as black squares, the specificity as unfilled diamonds, and the sensitivity as unfilled squares. The accuracy as measured on the X-axis shows the fraction of correctly classified samples.

[0047] FIG. 36 shows the level of methylation determined by different MSP MethyLight™ assays and HeavyMethyl™ MethyLight™ assays. The Y-axis shows the degree of methylation. Tumor samples are represented by white points, and normal colon tissue samples by black points. A significantly higher degree of methylation was observed in tumor samples than in healthy tissue samples.

[0048] FIG. 37 shows the Receiver Operating Characteristic curve (ROC curve) of the SEQ ID NO:35-MSP-MethylLight™-Assay for adenocarcinomas according to EXAMPLE 2. The AUC for the MSP-MethylLight™-Assay is: 0.94.

[0049] FIG. 38 shows the Receiver Operating Characteristic curve (ROC curve) of the SEQ ID NO:35-HM-MethylLight-Assay for Adenocarcinoma according to EXAMPLE 3. The AUC for the HM-MethylLight™-Assay is: 0.91.

[0050] FIG. 39 shows the level of methylation determined by a SEQ ID NO:35-HeavyMethyl™ MethyLight™ assay according to EXAMPLE 3, testing an additional set of colon samples (25 adenocarcinoma, 33 normals, and 13 adenomas). The Y-axis shows the degree of methylation within the region of the SEQ ID NO:35 gene investigated. Adenocarcinoma samples are represented by white squares, and normal colon tissue samples by black diamonds. A significantly higher degree of methylation was observed in tumor samples than in healthy tissue samples. The level of significance as measured using a t-test was 0.00424.

[0051] FIG. 40 shows the Receiver Operating Characteristic curve (ROC curve) of the SEQ ID NO:35-HM-MethylLight™-Assay for Adenocarcinoma and Adenoma according to EXAMPLE 3 (additional sets of samples). The area under an ROC curve (AUC) is a measure for the accuracy of a diagnostic test. The AUC for the HM-MethylLight™-Assay is 0.81.

[0052] FIG. 41 shows the Receiver Operating Characteristic curve (ROC curve) of the SEQ ID NO:35-HM-MethylLight™-Assay for Adenocarcinoma only according to EXAMPLE 2 (additional sets of samples). The area under an ROC curve (AUC) is a measure for the accuracy of a diagnostic test. The AUC for the HM-Methyl-Light-Assay is: 0.844.

[0053] FIG. 42 shows the Receiver Operating Characteristic curve (ROC curve) of the SEQ ID NO:35-HM-MethylLight™-Assay for Adenenomas according to EXAMPLE 3 (additional sets of samples). The area under an ROC curve (AUC) is a measure for the accuracy of a diagnostic test. The AUC for the HM-MethylLight™-Assay is: 0.748.

[0054] FIG. 43 shows the level of methylation in different tumor and healthy tissues determined by a SEQ ID NO 35-HeavyMethyl™ MethyLight™ assay according to example 4. The Y-axis shows the degree of methylation within the region of the SEQ ID NO:35 gene investigated. Besides the colon cancer samples only one of the two breast cancer tissues were methylated.

[0055] FIG. 44 shows the level of methylation in different breast cancer tissues determined by a SEQ ID NO:35-HeavyMethyl™ MethyLight™ assay according to EXAMPLE 4. Only one was methylated.

[0056] FIG. 45 shows the level of methylation in serum samples determined by a SEQ ID NO:35-HeavyMethyl™ MethyLight™ assay according to EXAMPLE 4. The Y-axis shows the degree of methylation within the region of the SEQ ID NO:35 gene investigated.

[0057] FIG. 46 shows the ROC curve of the SEQ ID NO:34-MSP-Methyl-Light™-Assay according to EXAMPLE 9. The AUC is: 0.84.

[0058] FIG. 47 shows the ROC curve of the SEQ ID NO:29-MSP-Methyl-Light™-Assay according to EXAMPLE 10. The AUC is: 0.80.

[0059] FIG. 48 shows the regression plot of the percentage methylation within SEQ ID NO:35 calculated in each sample using the MSP and HeavyMethyl™ variants of the MethyLight™ assay.

[0060] FIG. 49 shows the ROC curve of the SEQ ID NO:29-MSP-MethylLight™-Assay according to EXAMPLE 8 (first sample set). The AUC is: 0.93.

[0061] FIG. 50 shows the ROC curve of the SEQ ID NO:29-MSP-MethylLight™-Assay according to EXAMPLE 8 (second sample set). The AUC is: 1.

[0062] FIG. 51 shows the ROC curve of the SEQ ID NO:39-MSP-MethylLight™-Assay according to EXAMPLE 9. The AUC is: 0.94.

[0063] FIGS. 52 to 59 show the amplification of stool samples according to example 10. The X-axis shows the cycle number of the polymerase chain reaction, the Y-axis shows the delta Rn, which is the fluorescence intensity over background, the horizontal line (A) represents the threshold level of the calibration curve (B), if the curve reaches above (A) methylation has been detected.

[0064] FIGS. 60 to 71 show the PCR amplification of samples according to example 11. Each individual sample is annotated on the x-axis as ‘n’ denoting normal, or ‘t’ denoting tumour. A bronchial tissue sample was accidentally analysed in some assays, these are annotated with an arrow, and are irrelevant in the context of the present invention. The Y-axis shows the level of methylation (‘methylation rate’) in the sample. The methylation rate {methylated/(methylated+unmethylated) are shown for the fragments corresponding to the primer pairs in Table 4.

[0065] FIGS. 72 to 86 show the PCR amplification of samples according to assays 1 to 15 of example 14 respectively. The X-axis shows the cycle number of the polymerase chain reaction, the Y-axis shows the fluorescence intensity over background.

[0066] FIG. 72 shows the amplification curve of assay 1.

[0067] FIG. 73 shows the amplification curve of assay 2.

[0068] FIG. 74 shows the amplification curve of assay 3.

[0069] FIG. 75 shows the amplification curve of assay 4.

[0070] FIG. 76 shows the amplification curve of assay 5.

[0071] FIG. 77 shows the amplification curve of assay 6.

[0072] FIG. 78 shows the amplification curve of assay 7.

[0073] FIG. 79 shows the amplification curve of assay 8.

[0074] FIG. 80 shows the amplification curve of assay 9.

[0075] FIG. 81 shows the amplification curve of assay 10.

[0076] FIG. 82 shows the amplification curve of assay 11.

[0077] FIG. 83 shows the amplification curve of assay 12.

[0078] FIG. 84 shows the amplification curve of assay 13.

[0079] FIG. 85 shows the amplification curve of assay 14.

[0080] FIG. 86 shows the amplification curve of assay 15.

[0081] FIGS. 87 to 95 show the class prediction performance of quadratic SVMs trained on the data set according to example 14. Circled points are the support vectors defining the borderline (white) between the lighter and darker shaded areas.

[0082] FIG. 87 shows an SVM trained using Assays 12 and 9.

[0083] FIG. 88 shows an SVM trained using Assays 12 and 11.

[0084] FIG. 89 shows an SVM trained using Assays 12 and 15.

[0085] FIG. 90 shows an SVM trained using Assays 7 and 6.

[0086] FIG. 91 shows an SVM trained using Assays 11 and 5.

[0087] FIG. 92 shows an SVM trained using Assays 7 and 5.

[0088] FIG. 93 shows an SVM trained using Assays 6 and 4.

[0089] FIG. 94 shows an SVM trained using Assays 12 and 7.

[0090] FIG. 95 shows an SVM trained using Assays 12 and 6.

[0091] FIG. 96 shows a ranked matrices of data obtained according to Examples 1 and 2 according to CpG methylation differences between the two classes of tissues, (aerodigestive cancer on the left and healthy aerodigestive tissues on the right) using an algorithim. The most significant CpG positions are at the bottom of the matrix with significance decreasing towards the top. Red indicates total methylation at a given CpG position, green represents no methylation at the particular position. Each row represents one specific CpG position within a gene and each column shows the methylation profile for the different CpGs for one sample.

### DETAILED DESCRIPTION OF THE INVENTION

### Definitions

[0092] The term “Observed/Expected Ratio” (“O/E Ratio”) refers to the frequency of CpG dinucleotides within a particular DNA sequence, and corresponds to the [number of CpG sites/(number of C bases x number of G bases)]×band length for each fragment.

[0093] The term “CpG island” refers to a contiguous region of genomic DNA that satisfies the criteria of (1) having a frequency of CpG dinucleotides corresponding to an “Observed/Expected Ratio” >0.6, and (2) having a “GC Content” >0.5. CpG islands are typically, but not always, between about 0.2 to about 1 kb, or to about 2 kb in length.

[0094] The term “methylation state” or “methylation status” refers to the presence or absence of 5-methylcytosine (“5-mCyt”) at one or a plurality of CpG dinucleotides within a DNA sequence. Methylation states at one or more particular CpG methylation sites (each having two CpG dinucleotide sequences) within a DNA sequence include “unmethylated,” “fully-methylated” and “hemi-methylated.”

[0095] The term “hemi-methylation” or “hemimethylation” refers to the methylation state of a palindromic CpG methylation site, where only a single cytosine in one of the two CpG dinucleotide sequences of the palindromic CpG methylation site is methylated (e.g., 5′-CCMGG-3′ (top strand): 3′-GGCC-5′ (bottom strand)).

[0096] The term ‘AUC’ as used herein is an abbreviation for the area under a curve. In particular it refers to the area under a Receiver Operating Characteristic (ROC) curve. The ROC curve is a plot of the true positive rate against the false positive rate for the different possible cutpoints of a diagnostic test. It shows the tradeoff between sensitivity and specificity depending on the selected cutpoint (any increase in sensitivity will be accompanied by a decrease in specificity). The area under an ROC curve (AUC) is a measure for the accuracy of a diagnostic test (the larger the area the better, optimum is 1, a random test would have a ROC curve lying on the diagonal with an area of 0.5; for reference: J. P. Egan. Signal Detection Theory and ROC Analysis, Academic Press, New York, 1975).

[0097] The term “hypermethylation” refers to the average methylation state corresponding to an increased presence of 5-mCyt at one or a plurality of CpG dinucleotides within a DNA sequence of a test DNA sample, relative to the amount of 5-mCyt found at corresponding CpG dinucleotides within a normal control DNA sample.

[0098] The term “hypomethylation” refers to the average methylation state corresponding to a decreased presence of 5-mCyt at one or a plurality of CpG dinucleotides within a DNA sequence of a test DNA sample, relative to the amount of 5-mCyt found at corresponding CpG dinucleotides within a normal control DNA sample.

[0099] The term “microarray” refers broadly to both “DNA microarrays,” and ‘DNA chip(s),’ as recognized in the art, encompasses all art-recognized solid supports, and encompasses all methods for affixing nucleic acid molecules thereto or synthesis of nucleic acids thereon.

[0100] “Genetic parameters” are mutations and polymorphisms of genes and sequences further required for their regulation. To be designated as mutations are, in particular, insertions, deletions, point mutations, inversions and polymorphisms and, particularly preferred, SNPs (single nucleotide polymorphisms).

[0101] “Epigenetic parameters” are, in particular, cytosine methylations. Further epigenetic parameters include, for example, the acetylation of histones which, however, cannot be directly analyzed using the described method but which, in turn, correlate with the DNA methylation.

[0102] The term “bisulfite reagent” refers to a reagent comprising bisulfite, disulfite, hydrogen sulfite or combinations thereof, useful as disclosed herein to distinguish between methylated and unmethylated CpG dinucleotide sequences.

[0103] The term “Methylation assay” refers to any assay for determining the methylation state of one or more CpG dinucleotide sequences within a sequence of DNA.

[0104] The term “MS.AP-PCR” (Methylation-Sensitive Arbitrarily-Primed Polymerase Chain Reaction) refers to the art-recognized technology that allows for a global scan of the genome using CG-rich primers to focus on the regions most likely to contain CpG dinucleotides, and described by Gonzalgo et al., Cancer Research 57:594-599, 1997.

[0105] The term “MethyLight™” refers to the art-recognized fluorescence-based real-time PCR technique described by Eads et al., Cancer Res. 59:2302-2306, 1999.

[0106] The term “HeavyMethyl™” assay, in the embodiment thereof implemented herein, refers to an assay, wherein methylation specific blocking probes (also referred to herein as blockers) covering CpG positions between, or covered by the amplification primers enable methylation-specific selective amplification of a nucleic acid sample.

[0107] The term “HeavyMethyl™ MethyLight™” assay, in the embodiment thereof implemented herein, refers to a HeavyMethyl™ MethyLight™ assay, which is a variation of the MethyLight™ assay, wherein the MethyLight™ assay is combined with methylation specific blocking probes covering CpG positions between the amplification primers.

[0108] The term “Ms-SNuPE” (Methylation-sensitive Single Nucleotide Primer Extension) refers to the art-recognized assay described by Gonzalgo & Jones, Nucleic Acids Res. 25:2529-2531, 1997.

[0109] The term “MSP” (Methylation-specific PCR) refers to the art-recognized methylation assay described by Herman et al. Proc. Natl. Acad. Sci. USA 93:9821-9826, 1996, and by U.S. Pat. No. 5,786,146.

[0110] The term “COBRA” (Combined Bisulfite Restriction Analysis) refers to the art-recognized methylation assay described by Xiong & Laird, Nucleic Acids Res. 25:2532-2534, 1997.

[0111] The term “MCA” (Methylated CpG Island Amplification) refers to the methylation assay described by Toyota et al., Cancer Res. 59:2307-12, 1999, and in WO 00/26401A1.

[0112] The term “hybridization” is to be understood as a bond of an oligonucleotide to a complementary sequence along the lines of the Watson-Crick base pairings in the sample DNA, forming a duplex structure.

[0113] “Stringent hybridization conditions,” as defined herein, involve hybridizing at 68° C. in 5×SSC/5×Denhardt's solution/1.0% SDS, and washing in 0.2×SSC/0.1% SDS at room temperature, or involve the art-recognized equivalent thereof (e.g., conditions in which a hybridization is carried out at 60° C. in 2.5×SSC buffer, followed by several washing steps at 37° C. in a low buffer concentration, and remains stable). Moderately stringent conditions, as defined herein, involve including washing in 3×SSC at 42° C., or the art-recognized equivalent thereof. The parameters of salt concentration and temperature can be varied to achieve the optimal level of identity between the probe and the target nucleic acid. Guidance regarding such conditions is available in the art, for example, by Sambrook et al., 1989, Molecular Cloning, A Laboratory Manual, Cold Spring Harbor Press, N.Y.; and Ausubel et al. (eds.), 1995, Current Protocols in Molecular Biology, (John Wiley & Sons, N.Y.) at Unit 2.10.

[0114] The terms “array SEQ ID NO,” “composite array SEQ ID NO,” or “composite array sequence” refer to a sequence, hypothetical or otherwise, consisting of a head-to-tail (5′ to 3′) linear composite of all individual contiguous sequences of a subject array (e.g., a head-to-tail composite of SEQ ID NOS:1-71, in that order).

[0115] The terms “array SEQ ID NO node,” “composite array SEQ ID NO node,” or “composite array sequence node” refer to a junction between any two individual contiguous sequences of the “array SEQ ID NO,” the “composite array SEQ ID NO,” or the “composite array sequence.”

[0116] In reference to composite array sequences, the phrase “contiguous nucleotides” refers to a contiguous sequence region of any individual contiguous sequence of the composite array, but does not include a region of the composite array sequence that includes a “node,” as defined herein above.

### Overview:

[0117] The present invention provides for molecular genetic markers that have novel utility for the analysis of methylation patterns associated with the development of colorectal cell proliferative disorders. Said markers may be used for detecting or distinguishing between colorectal cell proliferative disorders, thereby providing improved means for the classification and treatment of said disorders. In an alternative embodiment said molecular genetic markers may be used for the detection of aerodigestive cell proliferative disorders.

[0118] Bisulfite Modification of DNA is an Art-Recognized Tool Used to Assess CpG Methylation Status.

[0119] 5-methylcytosine is the most frequent covalent base modification in the DNA of eukaryotic cells. It plays a role, for example, in the regulation of the transcription, in genetic imprinting, and in tumorigenesis. Therefore, the identification of 5-methylcytosine as a component of genetic information is of considerable interest. However, 5-methylcytosine positions cannot be identified by sequencing, because 5-methylcytosine has the same base pairing behavior as cytosine. Moreover, the epigenetic information carried by 5-methylcytosine is completely lost during, e.g., PCR amplification.

[0120] The most frequently used method for analyzing DNA for the presence of 5-methylcytosine is based upon the specific reaction of bisulfite with cytosine whereby, upon subsequent alkaline hydrolysis, cytosine is converted to uracil which corresponds to thymine in its base pairing behavior. Significantly, however, 5-methylcytosine remains unmodified under these conditions. Consequently, the original DNA is converted in such a manner that methylcytosine, which originally could not be distinguished from cytosine by its hybridization behavior, can now be detected as the only remaining cytosine using standard, art-recognized molecular biological techniques, for example, by amplification and hybridization, or by sequencing. All of these techniques are based on differential base pairing properties, which can now be fully exploited.

[0121] The prior art, in terms of sensitivity, is defined by a method comprising enclosing the DNA to be analyzed in an agarose matrix, thereby preventing the diffusion and renaturation of the DNA (bisulfite only reacts with single-stranded DNA), and replacing all precipitation and purification steps with fast dialysis (Olek A, et al., A modified and improved method for bisulfite based cytosine methylation analysis, Nucleic Acids Res. 24:5064-6, 1996). It is thus possible to analyze individual cells for methylation status, illustrating the utility and sensitivity of the method. An overview of art-recognized methods for detecting 5-methylcytosine is provided by Rein, T., et al., Nucleic Acids Res., 26:2255, 1998.

[0122] The bisulfite technique, barring few exceptions (e.g., Zeschnigk M, et al., Eur J Hum Genet. 5:94-98, 1997), is currently only used in research. In all instances, short, specific fragments of a known gene are amplified subsequent to a bisulfite treatment, and either completely sequenced (Olek & Walter, Nat Genet. 1997 17:275-6, 1997), subjected to one or more primer extension reactions (Gonzalgo & Jones, Nucleic Acids Res., 25:2529-31, 1997; WO 95/00669; U.S. Pat. No. 6,251,594) to analyze individual cytosine positions, or treated by enzymatic digestion (Xiong & Laird, Nucleic Acids Res., 25:2532-4, 1997). Detection by hybridization has also been described in the art (Olek et al., WO 99/28498). Additionally, use of the bisulfite technique for methylation detection with respect to individual genes has been described (Grigg & Clark, Bioessays, 16:431-6, 1994; Zeschnigk M, et al., Hum Mol Genet., 6:387-95, 1997; Feil R, et al., Nucleic Acids Res., 22:695-, 1994; Martin V, et al., Gene, 157:261-4, 1995; WO 9746705 and WO 9515373).

[0123] The present invention provides for the use of the bisulfite technique, in combination with one or more methylation assays, for determination of the methylation status of CpG dinucleotide sequences within sequences from the group consisting of SEQ ID NOS:1 to SEQ ID NO:64. According to the present invention, determination of the methylation status of CpG dinucleotide sequences within sequences from the group consisting of SEQ ID NOS:1 to SEQ ID NO:64 has diagnostic and prognostic utility.

[0124] Methylation Assay Procedures.

[0125] Various methylation assay procedures are known in the art, and can be used in conjunction with the present invention. These assays allow for determination of the methylation state of one or a plurality of CpG dinucleotides (e.g., CpG islands) within a DNA sequence. Such assays involve, among other techniques, DNA sequencing of bisulfite-treated DNA, PCR (for sequence-specific amplification), Southern blot analysis, and use of methylation-sensitive restriction enzymes.

[0126] For example, genomic sequencing has been simplified for analysis of DNA methylation patterns and 5-methylcytosine distribution by using bisulfite treatment (Frommer et al., Proc. Natl. Acad. Sci. USA 89:1827-1831, 1992). Additionally, restriction enzyme digestion of PCR products amplified from bisulfite-converted DNA is used, e.g., the method described by Sadri & Hornsby (Nucl. Acids Res. 24:5058-5059, 1996), or COBRA (Combined Bisulfite Restriction Analysis) (Xiong & Laird, Nucleic Acids Res. 25:2532-2534, 1997).

[0127] COBRA. COBRA™ analysis is a quantitative methylation assay useful for determining DNA methylation levels at specific gene loci in small amounts of genomic DNA (Xiong & Laird, Nucleic Acids Res. 25:2532-2534, 1997). Briefly, restriction enzyme digestion is used to reveal methylation-dependent sequence differences in PCR products of sodium bisulfite-treated DNA. Methylation-dependent sequence differences are first introduced into the genomic DNA by standard bisulfite treatment according to the procedure described by Frommer et al. (Proc. Natl. Acad. Sci. USA 89:1827-1831, 1992). PCR amplification of the bisulfite converted DNA is then performed using primers specific for the CpG islands of interest, followed by restriction endonuclease digestion, gel electrophoresis, and detection using specific, labeled hybridization probes. Methylation levels in the original DNA sample are represented by the relative amounts of digested and undigested PCR product in a linearly quantitative fashion across a wide spectrum of DNA methylation levels. In addition, this technique can be reliably applied to DNA obtained from microdissected paraffin-embedded tissue samples.

[0128] Typical reagents (e.g., as might be found in a typical COBRA™-based kit) for COBRA™ analysis may include, but are not limited to: PCR primers for specific gene (or bisulfite treated DNA sequence or CpG island); restriction enzyme and appropriate buffer; gene-hybridization oligo; control hybridization oligo; kinase labeling kit for oligo probe; and labeled nucleotides. Additionally, bisulfite conversion reagents may include: DNA denaturation buffer; sulfonation buffer; DNA recovery reagents or kits (e.g., precipitation, ultrafiltration, affinity column); desulfonation buffer; and DNA recovery components.

[0129] Preferably, assays such as “MethyLight™” (a fluorescence-based real-time PCR technique) (Eads et al., Cancer Res. 59:2302-2306, 1999), Ms-SNuPE™ (Methylation-sensitive Single Nucleotide Primer Extension) reactions (Gonzalgo & Jones, Nucleic Acids Res. 25:2529-2531, 1997), methylation-specific PCR (“MSP”; Herman et al., Proc. Natl. Acad. Sci. USA 93:9821-9826, 1996; U.S. Pat. No. 5,786,146), and methylated CpG island amplification (“MCA”; Toyota et al., Cancer Res. 59:2307-12, 1999) are used alone or in combination with other of these methods.

[0130] MethyLight™.

[0131] The MethyLight™ assay is a high-throughput quantitative methylation assay that utilizes fluorescence-based real-time PCR (TaqMan™) technology that requires no further manipulations after the PCR step (Eads et al., Cancer Res. 59:2302-2306, 1999). Briefly, the MethyLight™ process begins with a mixed sample of genomic DNA that is converted, in a sodium bisulfite reaction, to a mixed pool of methylation-dependent sequence differences according to standard procedures (the bisulfite process converts unmethylated cytosine residues to uracil). Fluorescence-based PCR is then performed either in an “unbiased” (with primers that do not overlap known CpG methylation sites) PCR reaction, or in a “biased” (with PCR primers that overlap known CpG dinucleotides) reaction. Sequence discrimination can occur either at the level of the amplification process or at the level of the fluorescence detection process, or both.

[0132] The MethyLight™ assay may be used as a quantitative test for methylation patterns in the genomic DNA sample, wherein sequence discrimination occurs at the level of probe hybridization. In this quantitative version, the PCR reaction provides for unbiased amplification in the presence of a fluorescent probe that overlaps a particular putative methylation site. An unbiased control for the amount of input DNA is provided by a reaction in which neither the primers, nor the probe overlie any CpG dinucleotides. Alternatively, a qualitative test for genomic methylation is achieved by probing of the biased PCR pool with either control oligonucleotides that do not “cover” known methylation sites (a fluorescence-based version of the “MSP” technique), or with oligonucleotides covering potential methylation sites.

[0133] The MethyLight™ process can by used with a “TaqMan®” probe in the amplification process. For example, double-stranded genomic DNA is treated with sodium bisulfite and subjected to one of two sets of PCR reactions using TaqMan® probes; e.g., with either biased primers and TaqMan® probe, or unbiased primers and TaqMan® probe. The TaqMan® probe is dual-labeled with fluorescent “reporter” and “quencher” molecules, and is designed to be specific for a relatively high GC content region so that it melts out at about 10° C. higher temperature in the PCR cycle than the forward or reverse primers. This allows the TaqMan® probe to remain fully hybridized during the PCR annealing/extension step. As the Taq polymerase enzymatically synthesizes a new strand during PCR, it will eventually reach the annealed TaqMan® probe. The Taq polymerase 5′ to 3′ endonuclease activity will then displace the TaqMan® probe by digesting it to release the fluorescent reporter molecule for quantitative detection of its now unquenched signal using a real-time fluorescent detection system.

[0134] Typical reagents (e.g., as might be found in a typical MethyLight™-based kit) for MethyLight™ analysis may include, but are not limited to: PCR primers for specific gene (or bisulfite treated DNA sequence or CpG island); TaqMan® probes; optimized PCR buffers and deoxynucleotides; and Taq polymerase.

[0135] Ms-SNuPE.

[0136] The Ms-SNuPE™ technique is a quantitative method for assessing methylation differences at specific CpG sites based on bisulfite treatment of DNA, followed by single-nucleotide primer extension (Gonzalgo & Jones, Nucleic Acids Res. 25:2529-2531, 1997). Briefly, genomic DNA is reacted with sodium bisulfite to convert unmethylated cytosine to uracil while leaving 5-methylcytosine unchanged. Amplification of the desired target sequence is then performed using PCR primers specific for bisulfite-converted DNA, and the resulting product is isolated and used as a template for methylation analysis at the CpG site(s) of interest. Small amounts of DNA can be analyzed (e.g., microdissected pathology sections), and it avoids utilization of restriction enzymes for determining the methylation status at CpG sites.

[0137] Typical reagents (e.g., as might be found in a typical Ms-SNuPE™-based kit) for Ms-SNuPE™ analysis may include, but are not limited to: PCR primers for specific gene (or bisulfite treated DNA sequence or CpG island); optimized PCR buffers and deoxynucleotides; gel extraction kit; positive control primers; Ms-SNuPE™ primers for specific gene; reaction buffer (for the Ms-SNuPE reaction); and labelled nucleotides. Additionally, bisulfite conversion reagents may include: DNA denaturation buffer; sulfonation buffer; DNA recovery regents or kit (e.g., precipitation, ultrafiltration, affinity column); desulfonation buffer; and DNA recovery components.

[0138] MSP.

[0139] MSP (methylation-specific PCR) allows for assessing the methylation status of virtually any group of CpG sites within a CpG island, independent of the use of methylation-sensitive restriction enzymes (Herman et al. Proc. Natl. Acad. Sci. USA 93:9821-9826, 1996; U.S. Pat. No. 5,786,146). Briefly, DNA is modified by sodium bisulfite converting all unmethylated, but not methylated cytosines to uracil, and subsequently amplified with primers specific for methylated versus unmethylated DNA. MSP requires only small quantities of DNA, is sensitive to 0.1% methylated alleles of a given CpG island locus, and can be performed on DNA extracted from paraffin-embedded samples. Typical reagents (e.g., as might be found in a typical MSP-based kit) for MSP analysis may include, but are not limited to: methylated and unmethylated PCR primers for specific gene (or bisulfite treated DNA sequence or CpG island), optimized PCR buffers and deoxynucleotides, and specific probes.

[0140] MCA.

[0141] The MCA technique is a method that can be used to screen for altered methylation patterns in genomic DNA, and to isolate specific sequences associated with these changes (Toyota et al., Cancer Res. 59:2307-12, 1999). Briefly, restriction enzymes with different sensitivities to cytosine methylation in their recognition sites are used to digest genomic DNAs from primary tumors, cell lines, and normal tissues prior to arbitrarily primed PCR amplification. Fragments that show differential methylation are cloned and sequenced after resolving the PCR products on high-resolution polyacrylamide gels. The cloned fragments are then used as probes for Southern analysis to confirm differential methylation of these regions. Typical reagents (e.g., as might be found in a typical MCA-based kit) for MCA analysis may include, but are not limited to: PCR primers for arbitrary priming Genomic DNA; PCR buffers and nucleotides, restriction enzymes and appropriate buffers; g ene-hybridization oligos or probes; control hybridization oligos or probes.

Genomic Sequences According to SEQ ID NO:1 to SEQ ID NO:64, and Non-Naturally Occurring Treated Variants Thereof According to SEQ ID NOS:304 to SEQ ID NOS:535 and SEQ ID NOS:65 TO SEQ ID NO:88, were Determined to have Novel Utility for the Detection, Classification and/or Treatment of Colorectal Cell Proliferative Disorders

[0142] In one embodiment the invention provides a method for detecting and/or for detecting and distinguishing between or among colon cell proliferative disorders in a subject. Said method comprises the following steps: i) contacting genomic DNA isolated from bodily fluids obtained from the subject with at least one reagent, or series of reagents that distinguishes between methylated and non-methylated CpG dinucleotides within at least one target region of the genomic DNA, wherein said contiguous nucleotides comprise at least one CpG dinucleotide sequence; and ii) detecting, or detecting and distinguishing between or among colon cell proliferative disorders afforded with a sensitivity of greater than or equal to 80% and a specificity of greater than or equal to 80%.

[0143] Preferably, the sensitivity is from about 75% to about 96%, or from about 80% to about 90%, or from about 80% to about 85%. Preferably, the specificity is from about 75% to about 96%, or from about 80% to about 90%, or from about 80% to about 85%.

[0144] Genomic DNA may be isolated by any means standard in the art, including the use of commercially available kits. Briefly, wherein the DNA of interest is encapsulated in by a cellular membrane the biological sample must be disrupted and lysed by enzymatic, chemical or mechanical means. The DNA solution may then be cleared of proteins and other contaminants, e.g., by digestion with proteinase K. The genomic DNA is then recovered from the solution. This may be carried out by means of a variety of methods including salting out, organic extraction or binding of the DNA to a solid phase support. The choice of method will be affected by several factors including time, expense and required quantity of DNA. Body fluids are the preferred source of the DNA; particularly preferred are blood plasma, blood serum, whole blood, isolated blood cells and cells isolated from the blood.

[0145] The genomic DNA sample is then treated in such a manner that cytosine bases which are unmethylated at the 5′-position are converted to uracil, thymine, or another base which is dissimilar to cytosine in terms of hybridization behavior. This will be understood as ‘treatment’ herein.

[0146] The above described treatment of genomic DNA is preferably carried out with bisulfite (hydrogen sulfite, disulfite) and subsequent alkaline hydrolysis which results in a conversion of non-methylated cytosine nucleobases to uracil or to another base which is dissimilar to cytosine in terms of base pairing behavior.

[0147] The treated DNA is then analysed in order to determine the methylation state of one or more target gene sequences (prior to the treatment) associated with the development of colorectal carcinoma. It is particularly preferred that the target region comprises, or hybridizes under stringent conditions to at least 16 contiguous nucleotides of at least one gene or sequence selected from the group consisting the genes and sequences as listed in Table 1. It is further preferred that the sequences of said genes in Table 3 as described in the accompanying sequence listing are analysed. The method of analysis may be selected from those known in the art, including those listed herein. Particularly preferred are MethyLight, MSP and the use of blocking oligonucleotides as will be described herein. It is further preferred that any oligonucleotides used in such analysis (including primers, blocking oligonucleotides and detection probes) should be reverse complementary, identical, or hybridize under stringent or highly stringent conditions to an at least 16-base-pair long segment of the base sequences of one or more of SEQ ID NO: (IDBISEQFIRST) to SEQ ID NO: and (IDBISEQLAST) and sequences complementary thereto.

[0148] Aberrant methylation, more preferably hypermethylation of one or more genes or genomic sequences taken from the group consisting of: SEQ ID NOS:1-3, 14, 16, 21, 22, 23, 44-46, 48, 50, 59-64, COX7B, CST5, EYA3, FTH1, RNF4, SOX21, RNF4, ALX 4, ONC2, NGFR, DLX-5, HVIAAT, BTF3 Homolog 1, ADCY9, BCL-5, BCOR, TAFII28, HOMEOBOX PROTEIN SIX6, GSK-3 BETA, ELK-L, HLA-F, TGFBR2, AR, RNF30 and DUX4 are associated with the presence of colorectal carcinoma.

[0149] Analysis of one or a plurality of the sequences enables for the first time detecting, or detecting and distinguishing between or among colon cell proliferative disorders afforded with a sensitivity of greater than or equal to 80% and a specificity of greater than or equal to 80%. Sensitivity is calculated as: {detected colon neoplasia/all colon neoplasia); and specificity is calculated as (non-detected negatives/total negatives).

[0150] Preferably, the sensitivity is from about 75% to about 96%, or from about 80% to about 90%, or from about 80% to about 85%. Preferably, the specificity is from about 75% to about 96%, or from about 80% to about 90%, or from about 80% to about 85%.

[0151] Colon neoplasia can be defined as all colon malignancies or colon malignancies and large (>1 cm adenomas), or subsets thereof. Negatives can be defined as any disease other than colon malignancy and adenomas, or healthy individuals.

[0152] In one embodiment the method discloses the use of one or more genes or genomic sequences selected from the group consisting SEQ ID NOS:1-3, 14, 16, 21, 22, 23, 44-46, 48, 50, 59-64, COX7B, CST5, EYA3, FTH1, RNF4, SOX21, RNF4, ALX 4, ONC2, NGFR, DLX-5, HVIAAT, BTF3 Homolog 1, ADCY9, BCL-5, BCOR, TAFII28, HOMEOBOX PROTEIN SIX6, GSK-3 BETA, ELK-L, HLA-F, TGFBR2, AR, RNF30 and DUX4 as markers for the differentiation, detection and distinguishing of colon cell proliferative disorders.

[0153] Said use of the gene may be enabled by means of any analysis of the expression of the gene, by means of mRNA expression analysis or protein expression analysis. However, in the most preferred embodiment of the invention, the detection, differentiation and distinguishing of colon cell proliferative disorders is enabled by means of analysis of the methylation status of one or more genes or genomic sequences selected from the group consisting SEQ ID NOS:1-3, 14, 16, 21, 22, 23, 44-46, 48, 50, 59-64, COX7B, CST5, EYA3, FTH1, RNF4, SOX21, RNF4, ALX 4, ONC2, NGFR, DLX-5, HVIAAT, BTF3 Homolog 1, ADCY9, BCL-5, BCOR, TAFII28, HOMEOBOX PROTEIN SIX6, GSK-3 BETA, ELK-L, HLA-F, TGFBR2, AR, RNF30 and DUX4 and their promoter or regulatory elements. Methods for the methylation analysis of genes are described herein.

[0154] Aberrant levels of mRNA expression of the genes, genomic sequences or genes regulated by genomic sequences according to SEQ ID NOS: 1-3, 14, 16, 21, 22, 23, 44-46, 48, 50, 59-64, COX7B, CST5, EYA3, FTH1, RNF4, SOX21, RNF4, ALX 4, ONC2, NGFR, DLX-5, HVIAAT, BTF3 Homolog 1, ADCY9, BCL-5, BCOR, TAFII28, HOMEOBOX PROTEIN SIX6, GSK-3 BETA, ELK-L, HLA-F, TGFBR2, AR, RNF30 and DUX4 according to Table 3 are associated with colorectal carcinoma.

[0155] Accordingly, increased or decreased levels of expression of said genes or sequences are associable with the development of colorectal carcinoma and other colorectal cell proliferative disorders.

[0156] To detect the presence of mRNA encoding a gene or genomic sequence in a detection system for colon cancer, a sample is obtained from a patient. The sample can be a tissue biopsy sample or a sample of blood, plasma, serum or the like. The sample may be treated to extract the nucleic acids contained therein. The resulting nucleic acid from the sample is subjected to gel electrophoresis or other separation techniques. Detection involves contacting the nucleic acids and in particular the mRNA of the sample with a DNA sequence serving as a probe to form hybrid duplexes. The stringency of hybridisation is determined by a number of factors during hybridisation and during the washing procedure, including temperature, ionic strength, length of time and concentration of formamide. These factors are outlined in, for example, Sambrook et al. (Molecular Cloning: A Laboratory Manual, 2 d ed., 1989). Detection of the resulting duplex is usually accomplished by the use of labelled probes. Alternatively, the probe may be unlabeled, but may be detectable by specific binding with a ligand which is labelled, either directly or indirectly. Suitable labels and methods for labelling probes and ligands are known in the art, and include, for example, radioactive labels which may be incorporated by known methods (e.g., nick translation or kinasing), biotin, fluorescent groups, chemiluminescent groups (e.g., dioxetanes, particularly triggered dioxetanes), enzymes, antibodies, and the like.

[0157] In order to increase the sensitivity of the detection in a sample of mRNA transcribed from the gene or genomic sequence, the technique of reverse transcription/polymerisation chain reaction can be used to amplify cDNA transcribed from the mRNA. The method of reverse transcription/PCR is well known in the art (for example, see Watson and Fleming, supra).

[0158] The reverse transcription/PCR method can be performed as follows. Total cellular RNA is isolated by, for example, the standard guanidium isothiocyanate method and the total RNA is reverse transcribed. The reverse transcription method involves synthesis of DNA on a template of RNA using a reverse transcriptase enzyme and a 3′ end primer. Typically, the primer contains an oligo(dT) sequence. The cDNA thus produced is then amplified using the PCR method and EYA4 specific primers. (Belyavsky et al, Nucl Acid Res 17:2919-2932, 1989; Krug and Berger, Methods in Enzymology, Academic Press, N.Y., Vol. 152, pp. 316-325, 1987 which are incorporated by reference).

[0159] The present invention may also be described in certain embodiments as a kit for use in detecting a colon cancer disease state through testing of a biological sample. A representative kit may comprise one or more nucleic acid segments that selectively hybridise to the mRNA and a container for each of the one or more nucleic acid segments. In certain embodiments the nucleic acid segments may be combined in a single tube. In further embodiments, the nucleic acid segments may also include a pair of primers for amplifying the target mRNA. Such kits may also include any buffers, solutions, solvents, enzymes, nucleotides, or other components for hybridisation, amplification or detection reactions. Preferred kit components include reagents for reverse transcription-PCR, in situ hybridisation, Northern analysis and/or RPA The present invention further provides for methods to detect the presence of the polypeptide encoded by said genes or gene sequences in a sample obtained from a patient.

[0160] Aberrant levels of polypeptide expression of the polypeptides encoded by the genes, genomic sequences or genes regulated by genomic sequences according to SEQ ID NOS:1-3, 14, 16, 21, 22, 23, 44-46, 48, 50, 59-64, COX7B, CST5, EYA3, FTH1, RNF4, SOX21, RNF4, ALX 4, ONC2, NGFR, DLX-5, HVIAAT, BTF3 Homolog 1, ADCY9, BCL-5, BCOR, TAFII28, HOMEOBOX PROTEIN SIX6, GSK-3 BETA, ELK-L, HLA-F, TGFBR2, AR, RNF30 and DUX4 according to Table 3 are associated with colorectal carcinoma.

[0161] Accordingly over or under expression of said polypeptides are associable with the development of colorectal carcinoma and other colorectal cell proliferative disorders.

[0162] Any method known in the art for detecting proteins can be used. Such methods include, but are not limited to immunodiffusion, immunoelectrophoresis, immunochemical methods, binder-ligand assays, immunohistochemical techniques, agglutination and complement assays. (e.g., see Basic and Clinical Immunology, Sites and Terr, eds., Appleton & Lange, Norwalk, Conn. pp 217-262, 1991 which is incorporated by reference). Preferred are binder-ligand immunoassay methods including reacting antibodies with an epitope or epitopes and competitively displacing a labelled protein or derivative thereof.

[0163] Certain embodiments of the present invention comprise the use of antibodies specific to the polypeptide encoded by the genes or genomic sequences of the group consisting of SEQ ID NOS:1-3, 14, 16, 21, 22, 23, 44-46, 48, 50, 59-64, COX7B, CST5, EYA3, FTH1, RNF4, SOX 21, RNF4, ALX 4, ONC2, NGFR, DLX-5, HVIAAT, BTF3 Homolog 1, ADCY9, BCL-5, BCOR, TAFII28, HOMEOBOX PROTEIN SIX6, GSK-3 BETA, ELK-L, HLA-F, TGFBR2, AR, RNF30 and DUX4.

[0164] Such antibodies may be useful for diagnostic and prognostic applications in detecting the disease state, by comparing a patient's levels of colon disease marker expression to expression of the same markers in normal individuals. In certain embodiments production of monoclonal or polyclonal antibodies can be induced by the use of the coded polypeptide as antigene. Such antibodies may in turn be used to detect expressed proteins as markers for human disease states. The levels of such proteins present in the peripheral blood or tissue sample of a patient may be quantified by conventional methods. Antibody-protein binding may be detected and quantified by a variety of means known in the art, such as labelling with fluorescent or radioactive ligands. The invention further comprises kits for performing the above-mentioned procedures, wherein such kits contain antibodies specific for the investigated polypeptides.

[0165] Numerous competitive and non-competitive protein binding immunoassays are well known in the art. Antibodies employed in such assays may be unlabeled, for example as used in agglutination tests, or labelled for use a wide variety of assay methods. Labels that can be used include radionuclides, enzymes, fluorescers, chemiluminescers, enzyme substrates or co-factors, enzyme inhibitors, particles, dyes and the like for use in radioimmunoassay (RIA), enzyme immunoassays, e.g., enzyme-linked immunosorbent assay (ELISA), fluorescent immunoassays and the like. Polyclonal or monoclonal antibodies or epitopes thereof can be made for use in immunoassays by any of a number of methods known in the art.

[0166] One approach for preparing antibodies to a protein is the selection and preparation of an amino acid sequence of all or part of the protein, chemically synthesising the sequence and injecting it into an appropriate animal, usually a rabbit or a mouse (Milstein and Kohler Nature 256:495-497, 1975; Gulfre and Milstein, Methods in Enzymology: Immunochemical Techniques 73:1-46, Langone and Banatis eds., Academic Press, 1981 which are incorporated by reference). Methods for preparation of the polypeptides or epitopes thereof include, but are not limited to chemical synthesis, recombinant DNA techniques or isolation from biological samples.

[0167] In addition to the embodiments above wherein the methylation analysis of genes or genomic sequences selected from the group SEQ ID NOS:1-3, 14, 16, 21, 22, 23, 44-46, 48, 50, 59-64, COX7B, CST5, EYA3, FTH1, RNF4, SOX21, RNF4, ALX 4, ONC2, NGFR, DLX-5, HVIAAT, BTF3 Homolog 1, ADCY9, BCL-5, BCOR, TAFII28, HOMEOBOX PROTEIN SIX6, GSK-3 BETA, ELK-L, HLA-F, TGFBR2, AR, RNF30 and DUX4 according to Table 3 are analysed, the invention presents two further panels of genes with novel utility for the detection of colorectal cancer.

[0168] In a first further embodiment the present invention is based upon the analysis of methylation levels within one or more genes or genomic sequences taken from the group consisting of SEQ ID NOS:1-3, 14, 16, 21, 22, 23, 44-46, 48, 50, 59-64, COX7B, CST5, EYA3, FTH1, RNF4, SOX21, RNF4, ALX 4, ONC2, NGFR, DLX-5, HVIAAT, BTF3 Homolog 1, ADCY9, BCL-5, BCOR, TAFII28, HOMEOBOX PROTEIN SIX6, GSK-3 BETA, ELK-L, HLA-F, TGFBR2, AR, RNF30, DUX4, SMAD7, GTMBP, EYA4 and TCF1-ALPHA according to Table 3 and/or their regulatory sequences.

[0169] It is further preferred that the sequences of said genes or genomic sequences are as according to Table 3.

[0170] In a further embodiment the present invention is based upon the analysis of methylation levels within two or more genes or genomic sequences taken from the group consisting all genes and genomic sequences according to Table 3 and/or their regulatory sequences. It is further preferred that the sequences of said genes or genomic sequences are as according to SEQ ID NOS:1 to SEQ ID NO:64.

[0171] Particular embodiments of the present invention provide a novel application of the analysis of methylation levels and/or patterns within said sequences that enables a precise detection, characterisation and/or treatment of colorectal cell proliferative disorders. Early detection of colorectal cell proliferative disorders is directly linked with disease prognosis, and the disclosed method thereby enables the physician and patient to make better and more informed treatment decisions. The sequences of the group consisting SEQ ID NOS: 20, 41, 35, 3, 39, 33 & 27 have further utility for the detection of arodigestive cell proliferative disorders.

### Further Improvements

[0172] The present invention provides novel uses for genomic sequences selected from the group consisting of SEQ ID NOS:1 to SEQ ID NO:64. Additional embodiments provide modified variants of SEQ ID NOS:1 to SEQ ID NO:64, as well as oligonucleotides and/or PNA-oligomers for analysis of cytosine methylation patterns within SEQ ID NOS:1 to SEQ ID NO:64.

[0173] An objective of the invention comprises analysis of the methylation state of one or more CpG dinucleotides within at least one of the genomic sequences selected from the group consisting of SEQ ID NOS:1 to SEQ ID NO: 64 and sequences complementary thereto.

[0174] The disclosed invention provides treated nucleic acids, derived from genomic SEQ ID NOS:1 to SEQ ID NO:64, wherein the treatment is suitable to convert at least one unmethylated cytosine base of the genomic DNA sequence to uracil or another base that is detectably dissimilar to cytosine in terms of hybridization. The genomic sequences in question may comprise one, or more, consecutive or random methylated CpG positions. Said treatment preferably comprises use of a reagent selected from the group consisting of bisulfite, hydrogen sulfite, disulfite, and combinations thereof. In a preferred embodiment of the invention, the objective comprises analysis of a non-naturally occurring modified nucleic acid comprising a sequence of at least 16 contiguous nucleotide bases in length of a sequence selected from the group consisting of SEQ ID NOS:304 to SEQ ID NO:535 and SEQ ID NOS:65 to SEQ ID NO:88, wherein said sequence comprises at least one CpG, TpA or CpA dinucleotide and sequences complementary thereto. The sequences of SEQ ID NOS:304 to SEQ ID NO:535 and SEQ ID NOS:65 to SEQ ID NO:88 provide non-naturally occurring modified versions of the nucleic acid according to SEQ ID NOS:1 to SEQ ID NO:64, wherein the modification of each genomic sequence results in the synthesis of a nucleic acid having a sequence that is unique and distinct from said genomic sequence as follows. For each sense strand genomic DNA, e.g., SEQ ID NO:1, four converted versions are disclosed. A first version wherein “C”->“T,” but “CpG” remains “CpG” (i.e., corresponds to case where, for the genomic sequence, all “C” residues of CpG dinucleotide sequences are methylated and are thus not converted); a second version discloses the complement of the disclosed genomic DNA sequence (i.e. antisense strand), wherein “C”→“T,” but “CpG” remains “CpG” (i.e., corresponds to case where, for all “C” residues of CpG dinucleotide sequences are methylated and are thus not converted). The ‘upmethylated’ converted sequences of SEQ ID NOS:1 to SEQ ID NO:64 correspond to SEQ ID NOS:65 to 76 and SEQ ID NOS:304 to SEQ ID NO:419. A third chemically converted version of each genomic sequences is provided, wherein “C”→“T” for all “C” residues, including those of “CpG” dinucleotide sequences (i.e., corresponds to case where, for the genomic sequences, all “C” residues of CpG dinucleotide sequences are unmethylated); a final chemically converted version of each sequence, discloses the complement of the disclosed genomic DNA sequence (i.e. antisense strand), wherein “C”→“T” for all “C” residues, including those of “CpG” dinucleotide sequences (i.e., corresponds to case where, for the complement (antisense strand) of each genomic sequence, all “C” residues of CpG dinucleotide sequences are unmethylated). The ‘downmethylated’ converted sequences of SEQ ID NOS:1 to SEQ ID NO:64 correspond to SEQ ID NOS: 77 to 88 and SEQ ID NOS:420 to SEQ ID NO:535.

[0175] Significantly, heretofore, the nucleic acid sequences and molecules according SEQ ID NOS:1-7, 9-11, 14-23, 27, 31, 32, 40-42, 44-46, 48, 50-55 and 59-64 were not implicated in or connected with the detection, classification or treatment of colorectal cell proliferative disorders, or aerodigestive cell proliferative disorders.

[0176] In an alternative preferred embodiment, such analysis comprises the use of an oligonucleotide or oligomer for detecting the cytosine methylation state within genomic or treated (chemically modified) DNA, according to SEQ ID NOS:1 to SEQ ID NO:535. S aid oligonucleotide or oligomer comprising a nucleic acid sequence having a length of at least nine (9) nucleotides which hybridizes, under moderately stringent or stringent conditions (as defined herein above), to a treated nucleic acid sequence according to SEQ ID NOS: 65 to SEQ ID NO: 88 and SEQ ID NOS:304 to SEQ ID NO:535 and/or sequences complementary thereto, or to a genomic sequence according to SEQ ID NOS:1 to SEQ ID NO:64 and/or sequences complementary thereto.

[0177] Thus, the present invention includes nucleic acid molecules (e.g., oligonucleotides and peptide nucleic acid (PNA) molecules (PNA-oligomers)) that hybridize under moderately stringent and/or stringent hybridization conditions to all or a portion of the sequences SEQ ID NOS:1 to SEQ ID NO:535, or to the complements thereof. The hybridizing portion of the hybridizing nucleic acids is typically at least 9, 15, 20, 25, 30 or 35 nucleotides in length. However, longer molecules have inventive utility, and are thus within the scope of the present invention.

[0178] Preferably, the hybridizing portion of the inventive hybridizing nucleic acids is at least 95%, or at least 98%, or 100% identical to the sequence, or to a portion thereof of SEQ ID NOS:1 to SEQ ID NO:535, or to the complements thereof.

[0179] Hybridizing nucleic acids of the type described herein can be used, for example, as a primer (e.g., a PCR primer), or a diagnostic and/or prognostic probe or primer. Preferably, hybridization of the oligonucleotide probe to a nucleic acid sample is performed under stringent conditions and the probe is 100% identical to the target sequence. Nucleic acid duplex or hybrid stability is expressed as the melting temperature or Tm, which is the temperature at which a probe dissociates from a target DNA. This melting temperature is used to define the required stringency conditions.

[0180] For target sequences that are related and substantially identical to the corresponding sequence of SEQ ID NOS:1 to SEQ ID NO:64 (such as allelic variants and SNPs), rather than identical, it is useful to first establish the lowest temperature at which only homologous hybridization occurs with a particular concentration of salt (e.g., SSC or SSPE). Then, assuming that 1% mismatching results in a 1° C. decrease in the Tm, the temperature of the final wash in the hybridization reaction is reduced accordingly (for example, if sequences having >95% identity with the probe are sought, the final wash temperature is decreased by 5° C.). In practice, the change in Tm can be between 0.5° C. and 1.5° C. per 1% mismatch.

[0181] Examples of inventive oligonucleotides of length X (in nucleotides), as indicated by polynucleotide positions with reference to, e.g., SEQ ID NO:1, include those corresponding to sets (sense and antisense sets) of consecutively overlapping oligonucleotides of length X, where the oligonucleotides within each consecutively overlapping set (corresponding to a given X value) are defined as the finite set of Z oligonucleotides from nucleotide positions:

n to (n+(X−1));

[0182] where n=1, 2, 3, . . . (Y−(X−1));

[0183] where Y equals the length (nucleotides or base pairs) of SEQ ID NO:1 (2,280);

[0184] where X equals the common length (in nucleotides) of each oligonucleotide in the set (e.g., X=20 for a set of consecutively overlapping 20-mers); and

[0185] where the number (Z) of consecutively overlapping oligomers of length X for a given SEQ ID NO of length Y is equal to Y−(X−1). For example Z=2,280−19=2,261 for either sense or antisense sets of SEQ ID NO:1, where X=20.

[0186] Preferably, the set is limited to those oligomers that comprise at least one CpG; TpG or CpA dinucleotide.

[0187] Examples of inventive 20-mer oligonucleotides include the following set of 2,261 oligomers (and the antisense set complementary thereto), indicated by polynucleotide positions with reference to SEQ ID NO:1:

[0188] 1-20, 2-21, 3-22, 4-23, 5-24, . . . 2259-2278, 2260-2279 and 2261-2280.

[0189] Preferably, the set is limited to those oligomers that comprise at least one CpG, TpG or CpA dinucleotide.

[0190] Likewise, examples of inventive 25-mer oligonucleotides include the following set of 2,256 oligomers (and the antisense set complementary thereto), indicated by polynucleotide positions with reference to SEQ ID NO: 1:

[0191] 1-25, 2-26, 3-27, 4-28, 5-29, . . . 2254-2278, 2255-2279 and 2256-2280.

[0192] Preferably, the set is limited to those oligomers that comprise at least one CpG; TpG or CpA dinucleotide.

[0193] The present invention encompasses, for each of SEQ ID NOS:1 to SEQ ID NO:535 (sense and antisense), multiple consecutively overlapping sets of oligonucleotides or modified oligonucleotides of length X, where, e.g., X=9, 10, 17, 20, 22, 23, 25, 27, 30 or 35 nucleotides.

[0194] The oligonucleotides or oligomers according to the present invention constitute effective tools useful to ascertain genetic and epigenetic parameters of the genomic sequence corresponding to SEQ ID NOS:1 to SEQ ID NO:64. Preferred sets of such oligonucleotides or modified oligonucleotides of length X are those consecutively overlapping sets of oligomers corresponding to SEQ ID NOS:1 to SEQ ID NO:535 (and to the complements thereof). Preferably, said oligomers comprise at least one CpG, TpG or CpA dinucleotide.

[0195] Particularly preferred oligonucleotides or oligomers according to the present invention are those in which the cytosine of the CpG dinucleotide (or of the corresponding converted TpG or CpA dinucleotide) sequences is within the middle third of the oligonucleotide; that is, where the oligonucleotide is, for example, 13 bases in length, the CpG, TpG or CpA dinucleotide is positioned within the fifth to ninth nucleotide from the 5′-end.

[0196] The oligonucleotides of the invention can also be modified by chemically linking the oligonucleotide to one or more moieties or conjugates to enhance the activity, stability or detection of the oligonucleotide. Such moieties or conjugates include chromophores, fluorophors, lipids such as cholesterol, cholic acid, thioether, aliphatic chains, phospholipids, polyamines, polyethylene glycol (PEG), palmityl moieties, and others as disclosed in, for example, U.S. Pat. Nos. 5,514,758, 5,565,552, 5,567,810, 5,574,142, 5,585,481, 5,587,371, 5,597,696 and 5,958,773. The probes may also exist in the form of a PNA (peptide nucleic acid) which has particularly preferred pairing properties. Thus, the oligonucleotide may include other appended groups such as peptides, and may include hybridization-triggered cleavage agents (Krol et al., BioTechniques 6:958-976, 1988) or intercalating agents (Zon, Pharm. Res. 5:539-549, 1988). To this end, the oligonucleotide may be conjugated to another molecule, e.g., a chromophore, fluorophor, peptide, hybridization-triggered cross-linking agent, transport agent, hybridization-triggered cleavage agent, etc.

[0197] The oligonucleotide may also comprise at least one art-recognized modified sugar and/or base moiety, or may comprise a modified backbone or non-natural internucleoside linkage.

[0198] The oligonucleotides or oligomers according to p articular embodiments of the present invention are typically used in ‘sets,’ which contain at least one oligomer for analysis of each of the CpG dinucleotides of genomic sequences SEQ ID NOS:1 to SEQ ID NO:64 and sequences complementary thereto, or to the corresponding CpG, TpG or CpA dinucleotide within a sequence of the treated nucleic acids according to SEQ ID NOS:304 to SEQ ID NO:535 and sequences complementary thereto. However, it is anticipated that for economic or other factors it may be preferable to analyze a limited selection of the CpG dinucleotides within said sequences, and the content of the set of oligonucleotides is altered accordingly.

[0199] Therefore, in particular embodiments, the present invention provides a set of at least two (2) (oligonucleotides and/or PNA-oligomers) useful for detecting the cytosine methylation state in treated genomic DNA (SEQ ID NOS:304 to SEQ ID NO:535), or in genomic DNA (SEQ ID NOS:1 to SEQ ID NO:64 and sequences complementary thereto). These probes enable diagnosis, classification and/or therapy of genetic and epigenetic parameters of colorectal cell proliferative disorders. The set of oligomers may also be used for detecting single nucleotide polymorphisms (SNPs) in treated genomic DNA (SEQ ID NOS:304 to SEQ ID NO:535), or in genomic DNA (SEQ ID NOS:1 to SEQ ID NO:64 and sequences complementary thereto).

[0200] In preferred embodiments, at least one, and more preferably all members of a set of oligonucleotides is bound to a solid phase.

[0201] In further embodiments, the present invention provides a set of at least two (2) oligonucleotides that are used as ‘primer’ oligonucleotides for amplifying DNA sequences of one of SEQ ID NOS:1 to SEQ ID NO:535 and sequences complementary thereto, or segments thereof.

[0202] It is anticipated that the oligonucleotides may constitute all or part of an “array” or “DNA chip” (i.e., an arrangement of different oligonucleotides and/or PNA-oligomers bound to a solid phase). Such an array of different oligonucleotide- and/or PNA-oligomer sequences can be characterized, for example, in that it is arranged on the solid phase in the form of a rectangular or hexagonal lattice. The solid-phase surface may be composed of silicon, glass, polystyrene, aluminum, steel, iron, copper, nickel, silver, or gold. Nitrocellulose as well as plastics such as nylon, which can exist in the form of pellets or also as resin matrices, may also be used. An overview of the Prior Art in oligomer array manufacturing can be gathered from a special edition of Nature Genetics (Nature Genetics Supplement, Volume 21, January 1999, and from the literature cited therein). Fluorescently labeled probes are often used for the scanning of immobilized DNA arrays. The simple attachment of Cy3 and Cy5 d yes to the 5′-OH of the specific probe are particularly suitable for fluorescence labels. The detection of the fluorescence of the hybridized probes may be carried out, for example, via a confocal microscope. Cy3 and Cy5 dyes, besides many others, are commercially available.

[0203] It is also anticipated that the oligonucleotides, or particular sequences thereof, may constitute all or part of an “virtual array” wherein the oligonucleotides, or particular sequences thereof, are used, for example, as ‘specifiers’ as part of, or in combination with a diverse population of unique labeled probes to analyze a complex mixture of analytes. Such a method, for example is described in US 2003/0013091 (U.S. Ser. No. 09/898,743, published 16 Jan. 2003). In such methods, enough labels are generated so that each nucleic acid in the complex mixture (i.e., each analyte) can be uniquely bound by a unique label and thus detected (each label is directly counted, resulting in a digital read-out of each molecular species in the mixture).

[0204] It is particularly preferred that the oligomers according to the invention are utilised for at least one of: detection of; detection and differentiation between or among subclasses of; diagnosis of; prognosis of; treatment of; monitoring of; and treatment and monitoring of colorectal cell proliferative disorders. This is enabled by use of said sets for the detection or detection and differentiation of one or more of the following classes of tissues: colorectal carcinoma, colon adenoma, inflammatory colon tissue, grade 2 dysplasia colon adenomas less than 1 cm, grade 3 dysplasia colon adenomas larger than 1 cm, normal colon tissue, non-colon healthy tissue and non-colon cancer tissue.

[0205] Particularly preferred are those sets of oligomer that comprise at least two oligonucleotides selected from one of the following sets of oligonucleotides:

[0206] SEQ ID NOS:89-285, 14424-14453;

[0207] SEQ ID NOS:89-109, 113-223, 227-293, 14424-14453;

[0208] SEQ ID NOS:89-109, 113-161, 164-223, 227-285, 287-293, 14424-14453;

[0209] SEQ ID NOS:89, 90, 126-135, 147-151, 224-226, 253-256, 261-267, 283-285;

[0210] SEQ ID NOS:89-161, 164-293, 14424-14453;

[0211] SEQ ID NOS:89-109, 113-299, 14424-14453;

[0212] SEQ ID NOS:89-109, 113-293, 296-299, 14424-14453;

[0213] SEQ-ID NOS:1-12, 15-20, 22, 25-36, 38-49, 51-58;

[0214] SEQ ID NOS:681-683, 683, 684, 684, 685, 685, 686, 686, 687, 687, 688, 688-691, 691, 692, 692-695, 695, 696, 696-699, 699, 700, 700-709, 709, 710, 710-725, 725, 726, 726, 727, 727, 728, 728-760, 760, 761, 761, 762, 762, 763, 763-777, 784, 784, 785, 785, 786, 786, 787, 787-802, 802, 803, 803-814, 814, 815, 815-832, 832, 833, 833-836, 836, 837, 837-872, 872, 873, 873-876, 876, 877, 877, 878, 878, 879, 879-882, 882, 883, 883-892, 892, 893, 893-896, 896, 897, 897-909, 909, 910, 910, 911, 911, 912, 912-915, 915, 916, 916-921, 921-925, 925, 926, 926-939, 939, 940, 940, 941, 941, 942, 942-944, 944-957, 957, 958, 958, 959, 959, 960, 960, 961, 961, 962, 962-971, 971, 972, 972, 973, 973, 974, 974, 975, 975, 976, 976-979, 979, 980, 980, 981, 981-988, 988, 989, 989-994, 994, 995, 995-998, 998, 999, 999, 1000, 1000, 1001, 1001, 1002, 1002, 1003, 1003, 1010-1016, 1016, 1017, 1017, 1018, 1018, 1019, 1019-1028, 1028, 1029, 1029-1034, 1034, 1035, 1035-1046, 1046, 1047, 1047-1058, 1058, 1059, 1059, 1060, 1060, 1061, 1061, 1062, 1062, 1063, 1063-1070, 1070, 1071, 1071, 1072, 1072, 1073, 1073, 1074, 1074, 1075, 1075-1078, 1078, 1079, 1079-1084, 1084, 1085, 1085, 1086, 1086, 1087, 1087-1092, 1092, 1093, 1093, 1094, 1094, 1095, 1095-1102, 1102, 1103, 1103-1114, 1114, 1115, 1115-1119, 1119, 1120, 1120-1141, 1141, 1142, 1142;

[0215] SEQ ID NOS:681-683, 683, 684, 684, 685, 685, 686, 686, 687, 687, 688, 688-691, 691, 692, 692-695, 695, 696, 696-699, 699, 700, 700-709, 709, 710, 710-725, 725, 726, 726, 727, 727, 728, 728-760, 760, 761, 761, 762, 762, 763, 763-777, 784, 784, 785, 785, 786, 786, 787, 787-802, 802, 803, 803-814, 814, 815, 815-832, 832, 833, 833-836, 836, 837, 837-872, 872, 873, 873-876, 876, 877, 877, 878, 878, 879, 879-882, 882, 883, 883-885, 890-892, 892, 893, 893-896, 896, 897, 897-909, 909, 910, 910, 911, 911, 912, 912-915, 915, 916, 916-921, 921-925, 925, 926, 926-939, 939, 940, 940, 941, 941, 942, 942-944, 944-957, 957, 958, 958, 959, 959, 960, 960, 961, 961, 962, 962-971, 971, 972, 972, 973, 973, 974, 974, 975, 975, 976, 976-979, 979, 980, 980, 981, 981-988, 988, 989, 989-994, 994, 995, 995-998, 998, 999, 999, 1000, 1000, 1001, 1001, 1002, 1002, 1003, 1003, 1010-1016, 1016, 1017, 1017, 1018, 1018, 1019, 1019-1028, 1028, 1029, 1029-1034, 1034, 1035, 1035-1046, 1046, 1047, 1047-1058, 1058, 1059, 1059, 1060, 1060, 1061, 1061, 1062, 1062, 1063, 1063-1070, 1070, 1071, 1071, 1072, 1072, 1073, 1073, 1074, 1074, 1075, 1075-1078, 1078, 1079, 1079-1084, 1084, 1085, 1085, 1086, 1086, 1087, 1087-1092, 1092, 1093, 1093, 1094, 1094, 1095, 1095-1102, 1102, 1103, 1103-1114, 1114, 1115, 1115-1119, 1119, 1120, 1120-1124, 1129-1141, 1141, 1142,1142;

[0216] SEQ ID NOS:738-740, 810-814, 814, 815, 815-829, 854-865, 1004-1006, 1006, 1007, 1007-1009, 1062, 1062, 1063, 1063-1069, 1078, 1078, 1079, 1079-1084, 1084, 1085, 1085, 1086, 1086, 1087, 1087-1091, 1121-1124;

[0217] SEQ ID NOS:681-683, 683, 684, 684, 685, 685, 686, 686, 687, 687, 688, 688-691, 691, 692, 692-695, 695, 696, 696-699, 699, 700, 700-709, 709, 710, 710-725, 725, 726, 726, 727, 727, 728, 728-760, 760, 761, 761, 762, 762, 763, 763-784, 784, 785, 785, 786, 786, 787, 787-802, 802, 803, 803-814, 814, 815, 815-832, 832, 833, 833-836, 836, 837, 837-872, 872, 873, 873-876, 876, 877, 877, 878, 878, 879, 879-882, 882, 883, 883-892, 892, 893, 893-896, 896, 897, 897-909, 909, 910, 910, 911, 911, 912, 912-915, 915, 916, 916-921, 921-925, 925, 926, 926-939, 939, 940, 940, 941, 941, 942, 942-944, 944-957, 957, 958, 958, 959, 959, 960, 960, 961, 961, 962, 962-971, 971, 972, 972, 973, 973, 974, 974, 975, 975, 976, 976-979, 979, 980, 980, 981, 981-988, 988, 989, 989-994, 994, 995, 995-998, 998, 999, 999, 1000, 1000, 1001, 1001, 1002, 1002, 1003, 1003-1006, 1006, 1007, 1007-1016, 1016, 1017, 1017, 1018, 1018, 1019, 1019-1028, 1028, 1029, 1029-1034, 1034, 1035, 1035-1046, 1046, 1047, 1047-1058, 1058, 1059, 1059, 1060, 1060, 1061, 1061, 1062, 1062, 1063, 1063-1070, 1070, 1071, 1071, 1072, 1072, 1073, 1073, 1074, 1074, 1075, 1075-1078, 1078, 1079, 1079-1084, 1084, 1085, 1085, 1086, 1086, 1087, 1087-1092, 1092, 1093, 1093, 1094, 1094, 1095, 1095-1102, 1102,1103, 1103-1114, 1114, 1115, 1115-1119, 1119, 1120, 1120-1141, 1141, 1142, 1142-1145, 1145, 1146, 1146, 1147, 1147, 1148, 1148-1151, 1151, 1152, 1152-1154, 1154, 1155, 1155, 1156, 1156, 1157, 1157, 1158, 1158, 1159, 1159;

[0218] SEQ ID NOS:681-683, 683, 684, 684, 685, 685, 686, 686, 687, 687, 688, 688-691, 691, 692, 692-695, 695, 696, 696-699, 699, 700, 700-709, 709, 710, 710-725, 725, 726, 726, 727, 727, 728, 728-760, 760, 761, 761, 762, 762, 763, 763-784, 784, 785, 785, 786, 786, 787, 787-802, 802, 803, 803-814, 814, 815, 815-832, 832, 833, 833-836, 836, 837, 837-872, 872, 873, 873-876, 876, 877, 877, 878, 878, 879, 879-882, 882, 883, 883-885, 890-892, 892, 893, 893-896, 896, 897, 897-909, 909, 910, 910, 911, 911, 912,912-915, 915, 916, 916-921, 921-925, 925, 926, 926-939, 939, 940, 940, 941, 941, 942, 942-944, 944-957, 957, 958, 958, 959, 959, 960, 960, 961, 961, 962, 962-971, 971, 972, 972, 973, 973, 974, 974, 975, 975, 976, 976-979, 979, 980, 980, 981, 981-988, 988, 989, 989-994, 994, 995, 995-998, 998, 999, 999, 1000, 1000, 1001, 1001, 1002, 1002, 1003, 1003-1006, 1006, 1007, 1007-1016, 1016, 1017, 1017, 1018, 1018, 1019, 1019-1028, 1028, 1029, 1029-1034, 1034, 1035, 1035-1046, 1046, 1047, 1047-1058, 1058, 1059, 1059, 1060, 1060, 1061, 1061, 1062, 1062, 1063, 1063-1070, 1070, 1071, 1071, 1072, 1072, 1073, 1073, 1074, 1074, 1075, 1075-1078, 1078, 1079, 1079-1084, 1084, 1085, 1085, 1086, 1086, 1087, 1087-1092, 1092, 1093, 1093, 1094, 1094, 1095, 1095-1102,1102,1103, 1103-1114, 1114, 1115, 1115-1119, 1119, 1120, 1120-1141, 1141, 1142, 1142;

[0219] SEQ ID NOS:681-683, 683, 684, 684, 685, 685, 686, 686, 687, 687, 688, 688-691, 691, 692, 692-695, 695, 696, 696-699, 699, 700, 700-709, 709, 710, 710-725, 725, 726, 726, 727, 727, 728, 728-760, 760, 761, 761, 762, 762, 763, 763-777, 784, 784, 785, 785, 786, 786, 787, 787-802, 802, 803, 803-814, 814, 815, 815-832, 832, 833, 833-836, 836, 837, 837-872, 872, 873, 873-876, 876, 877, 877, 878, 878, 879, 879-882, 882, 883, 883-892, 892, 893, 893-896, 896, 897, 897-909, 909, 910, 910, 911, 911, 912, 912-915, 915, 916, 916-921, 921-925, 925, 926, 926-939, 939, 940, 940, 941, 941, 942, 942-944, 944-957, 957, 958, 958, 959, 959, 960, 960, 961, 961, 962, 962-971, 971, 972, 972, 973, 973, 974, 974, 975, 975, 976, 976-979, 979, 980, 980, 981, 981-988, 988, 989, 989-994, 994, 995, 995-998, 998, 999, 999, 1000, 1000, 1001, 1001, 1002, 1002, 1003, 1003-1006, 1006, 1007, 1007-1016, 1016, 1017, 1017, 1018, 1018, 1019, 1019-1028, 1028, 1029, 1029-1034, 1034, 1035, 1035-1046, 1046, 1047, 1047-1058, 1058, 1059, 1059, 1060, 1060, 1061, 1061, 1062, 1062, 1063, 1063-1070, 1070, 1071, 1071, 1072, 1072, 1073, 1073, 1074, 1074, 1075, 1075-1078, 1078, 1079, 1079-1084, 1084, 1085, 1085, 1086, 1086, 1087, 1087-1092, 1092, 1093, 1093, 1094, 1094, 1095, 1095-1102, 1102, 1103, 1103-1114, 1114, 1115, 1115-1119, 1119, 1120, 1120-1141, 1141, 1142, 1142-1145, 1145, 1146, 1146, 1147, 1147, 1148, 1148-1151, 1151, 1152, 1152;
[0220] and SEQ ID NOS:681-683, 683, 684, 684, 685, 685, 686, 686, 687, 687, 688, 688-691, 691, 692, 692-695, 695, 696, 696-699, 699, 700, 700-709, 709, 710, 710-725, 725, 726, 726, 727, 727, 728, 728-760, 760, 761, 761, 762, 762, 763, 763-777, 784, 784, 785, 785, 786, 786, 787, 787-802, 802, 803, 803-814, 814, 815, 815-832, 832, 833, 833-836, 836, 837, 837-872, 872, 873, 873-876, 876, 877, 877, 878, 878, 879, 879-882, 882, 883, 883-892, 892, 893, 893-896, 896, 897, 897-909, 909, 910, 910, 911, 911, 912,912-915, 915, 916, 916-921, 921-925, 925, 926, 926-939, 939, 940, 940, 941, 941, 942, 942-944, 944-957, 957, 958, 958, 959, 959, 960, 960, 961, 961, 962, 962-971, 971, 972, 972, 973, 973, 974, 974, 975, 975, 976, 976-979, 979, 980, 980, 981, 981-988, 988, 989, 989-994, 994, 995, 995-998, 998, 999, 999, 1000, 1000, 1001, 1001, 1002, 1002, 1003, 1003-1006, 1006, 1007, 1007-1016, 1016, 1017, 1017, 1018, 1018, 1019, 1019-1028, 1028, 1029, 1029-1034, 1034, 1035, 1035-1046, 1046, 1047, 1047-1058, 1058, 1059, 1059, 1060, 1060, 1061, 1061, 1062, 1062, 1063, 1063-1070, 1070, 1071, 1071, 1072, 1072, 1073, 1073, 1074, 1074, 1075, 1075-1078, 1078, 1079, 1079-1084, 1084, 1085, 1085, 1086, 1086, 1087, 1087-1092, 1092, 1093, 1093, 1094, 1094, 1095, 1095-1102,1102,1103, 1103-1114, 1114, 1115, 1115-1119, 1119, 1120, 1120-1141, 1141, 1142, 1142, 1145, 1145, 1146, 1146, 1147, 1147, 1148, 1148-1151, 1151, 1152, 1152.

[0221] In one embodiment of the method, at least one of colorectal carcinoma tissue or colon adenomas is distinguished from at least one tissue selected from the group consisting of inflammatory colon tissue and normal colon tissue. This is achieved by analysis of the methylation status of at least one target sequence comprising, or hybridizing under stringent conditions to at least 16 contiguous nucleotides of a sequence selected from the group consisting SEQ ID NOS:1-12, 15-20, 22, 25-36. 38-49, 51-58 and complements thereof. This is preferrably achieved by use of a set consisting of at least one oligonucleotide, and more preferably at least two selected from one of the groups consisting of, or by use of a set comprising of at least two oligonucleotides selected from one of the groups consisting of:

[0222] SEQ ID NOS:89-285 & 14424-14453; and

[0223] SEQ ID NOS:681-683, 683, 684, 684, 685, 685, 686, 686, 687, 687, 688, 688-691, 691, 692, 692-695, 695, 696, 696-699, 699, 700, 700-709, 709, 710, 710-725, 725, 726, 726, 727, 727, 728, 728-760, 760, 761, 761, 762, 762, 763, 763-784, 784, 785, 785, 786, 786, 787, 787-802, 802, 803, 803-814, 814, 815, 815-832, 832, 833, 833-836, 836, 837, 837-872, 872, 873, 873-876, 876, 877, 877, 878, 878, 879, 879-882, 882, 883, 883-892, 892, 893, 893-896, 896, 897, 897-909, 909, 910, 910, 911, 911, 912, 912-915, 915, 916, 916-921, 921-925, 925, 926, 926-939, 939, 940, 940, 941, 941, 942, 942-944, 944-957, 957, 958, 958, 959, 959, 960, 960, 961, 961, 962, 962-971, 971, 972, 972, 973, 973, 974, 974, 975, 975, 976, 976-979, 979, 980, 980, 981, 981-988, 988, 989, 989-994, 994, 995, 995-998, 998, 999, 999, 1000, 1000, 1001, 1001, 1002, 1002, 1003, 1003-1006, 1006, 1007, 1007-1016, 1016, 1017, 1017, 1018, 1018, 1019, 1019-1028, 1028, 1029, 1029-1034, 1034, 1035, 1035-1046, 1046, 1047, 1047-1058, 1058, 1059, 1059, 1060, 1060, 1061, 1061, 1062, 1062, 1063, 1063-1070, 1070, 1071, 1071, 1072, 1072, 1073, 1073, 1074, 1074, 1075, 1075-1078, 1078, 1079, 1079-1084, 1084, 1085, 1085, 1086, 1086, 1087, 1087-1092, 1092, 1093, 1093, 1094, 1094, 1095, 1095-1102, 1102, 1103, 1103-1114, 1114, 1115, 1115-1119, 1119, 1120, 1120-1124.

[0224] In one embodiment of the method, colorectal carcinoma is distinguished from at least one tissue selected from the group consisting of non-colon healthy tissue, peripheral blood lymphocytes and non-colon cancer. In one embodiment this is achieved by analysis of the methylation status of at least one target sequence comprising, or hybridizing under stringent conditions to at least 16 contiguous nucleotides of a sequence selected from the group consisting SEQ ID NOS:1-23, 26-36, 38-43, 45-49, 51-58. This is preferrably achieved by use of a set consisting of at least one oligonucleotide, and more preferably at least two oligonucleotides selected from one of the groups consisting of:

[0225] SEQ ID NOS:89-109, 113-223, 227-293, 14424-14453; and

[0226] SEQ ID NOS:681-683, 683, 684, 684, 685, 685, 686, 686, 687, 687, 688, 688-691, 691, 692, 692-695, 695, 696, 696-699, 699, 700, 700-709, 709, 710, 710-725, 725, 726, 726, 727, 727, 728, 728-760, 760, 761, 761, 762, 762, 763, 763-777, 784, 784, 785, 785, 786, 786, 787, 787-802, 802, 803, 803-814, 814, 815, 815-832, 832, 833, 833-836, 836, 837, 837-872, 872, 873, 873-876, 876, 877, 877, 878, 878, 879, 879-882, 882, 883, 883-892, 892, 893, 893-896, 896, 897, 897-909, 909, 910, 910, 911, 911, 912, 912-915, 915, 916, 916-921, 921-925, 925, 926, 926-939, 939, 940, 940, 941, 941, 942, 942-944, 944-957, 957, 958, 958, 959, 959, 960, 960, 961, 961, 962, 962-971, 971, 972, 972, 973, 973, 974, 974, 975, 975, 976, 976-979, 979, 980, 980, 981, 981-988, 988, 989, 989-994, 994, 995, 995-998, 998, 999, 999, 1000, 1000, 1001, 1001, 1002, 1002, 1003, 1003, 1010-1016, 1016, 1017, 1017, 1018, 1018, 1019, 1019-1028, 1028, 1029, 1029-1034, 1034, 1035, 1035-1046, 1046, 1047, 1047-1058, 1058, 1059, 1059, 1060, 1060, 1061, 1061, 1062, 1062, 1063, 1063-1070, 1070, 1071, 1071, 1072, 1072, 1073, 1073, 1074, 1074, 1075, 1075-1078, 1078, 1079, 1079-1084, 1084, 1085, 1085, 1086, 1086, 1087, 1087-1092, 1092, 1093, 1093, 1094, 1094, 1095, 1095-1102, 1102, 1103, 1103-1114, 1114, 1115, 1115-1119, 1119, 1120, 1120-1141, 1141, 1142, 1142.

[0227] In one embodiment of the method, colorectal carcinoma is distinguished from at least one tissue selected from the group consisting of inflammatory colon tissue, normal colon tissue, non-colon healthy tissue, peripheral blood lymphocytes, colon adenomas and non-colon cancer tissue. This is achieved by analysis of the methylation status of at least one target sequence comprising, or hybridizing under stringent conditions to at least 16 contiguous nucleotides of a sequence selected from the group consisting SEQ ID NO: 1-3, 5-13, 15-23, 26-36, 38-43, 45-49, 51-58 and complements thereof. This is preferably achieved by use of a set consisting of at least one oligonucleotide, and more preferably at least two by use of a set of oligomers comprising at least two oligonucleotides selected from one of the groups consisting of:

[0228] SEQ ID NOS:89-109, 113-161, 164-223, 227-285, 287-293, 14424-14453; and

[0229] SEQ ID NOS:681-683, 683, 684, 684, 685, 685, 686, 686, 687, 687, 688, 688-691, 691, 692, 692-695, 695, 696, 696-699, 699, 700, 700-709, 709, 710, 710-725, 725, 726, 726, 727, 727, 728, 728-760, 760, 761, 761, 762, 762, 763, 763-777, 784, 784, 785, 785, 786, 786, 787, 787-802, 802, 803, 803-814, 814, 815, 815-832, 832, 833, 833-836, 836, 837, 837-872, 872, 873, 873-876, 876, 877, 877, 878, 878, 879, 879-882, 882, 883, 883-885, 890-892, 892, 893, 893-896, 896, 897, 897-909, 909, 910, 910, 911, 911, 912, 912-915, 915, 916, 916-921, 921-925, 925, 926, 926-939, 939, 940, 940, 941, 941, 942, 942-944, 944-957, 957, 958, 958, 959, 959, 960, 960, 961, 961, 962, 962-971, 971, 972, 972, 973, 973, 974, 974, 975, 975, 976, 976-979, 979, 980, 980, 981, 981-988, 988, 989, 989-994, 994, 995, 995-998, 998, 999, 999, 1000, 1000, 1001, 1001, 1002, 1002, 1003, 1003, 1010-1016, 1016, 1017, 1017, 1018, 1018, 1019, 1019-1028, 1028, 1029, 1029-1034, 1034, 1035, 1035-1046, 1046, 1047, 1047-1058, 1058, 1059, 1059, 1060, 1060, 1061, 1061, 1062, 1062, 1063, 1063-1070, 1070, 1071, 1071, 1072, 1072, 1073, 1073, 1074, 1074, 1075, 1075-1078, 1078, 1079, 1079-1084, 1084, 1085, 1085, 1086, 1086, 1087, 1087-1092, 1092, 1093, 1093, 1094, 1094, 1095, 1095-1102, 1102, 1103, 1103-1114, 1114, 1115, 1115-1119, 1119, 1120, 1120-1124, 1129-1141, 1141, 1142, 1142.

[0230] In one embodiment of the method, the colorectal carcinoma is distinguished from colon adenomas. This is achieved by analysis of the methylation status of at least one target sequence comprising, or hybridizing under stringent conditions to at least 16 contiguous nucleotides of a sequence selected from the group consisting SEQ ID NO: 11, 25, 27, 38, 40, 45, 53 and complements thereof. This is preferrably achieved by use of a set consisting of at least one oligonucleotide, and more preferably at least two oligonucleotides selected from one of the groups consisting of: SEQ ID NOS:89, 90, 126-135, 147-151, 224-226, 253-256, 261-267, 283-285; and SEQ ID NOS:738-740, 810-814, 814, 815, 815-829, 854-865, 1004-1006, 1006, 1007, 1007-1009, 1062, 1062, 1063, 1063-1069, 1078, 1078, 1079, 1079-1084, 1084, 1085, 1085, 1086, 1086, 1087, 1087-1091, 1121-1124.

[0231] In one embodiment of the method, at least one of colorectal carcinoma tissue, or colon adenomas is distinguished from at least one tissue selected from the group consisting of inflammatory colon tissue and normal colon tissue. This is achieved by analysis of the methylation status of at least one target sequence comprising, or hybridizing under stringent conditions to at least 16 contiguous nucleotides of a sequence selected from the group consisting SEQ ID NO: 1-64 and complements thereof. This is preferably achieved by use of a set consisting of at least one oligonucleotide, and more preferably at least two oligomers comprising at least two oligonucleotides selected from one of the groups consisting of:

[0232] SEQ ID NOS: 89-303, 14424-14453; and

[0233] SEQ ID NOS:681-683, 683, 684, 684, 685, 685, 686, 686, 687, 687, 688, 688-691, 691, 692, 692-695, 695, 696, 696-699, 699, 700, 700-709, 709, 710, 710-725, 725, 726, 726, 727, 727, 728, 728-760, 760, 761, 761, 762, 762, 763, 763-784, 784, 785, 785, 786, 786, 787, 787-802, 802, 803, 803-814, 814, 815, 815-832, 832, 833, 833-836, 836, 837, 837-872, 872, 873, 873-876, 876, 877, 877, 878, 878, 879, 879-882, 882, 883, 883-892, 892, 893, 893-896, 896, 897, 897-909, 909, 910, 910, 911, 911, 912, 912-915, 915, 916, 916-921, 921-925, 925, 926, 926-939, 939, 940, 940, 941, 941, 942, 942-944, 944-957, 957, 958, 958, 959, 959, 960, 960, 961, 961, 962, 962-971, 971, 972, 972, 973, 973, 974, 974, 975, 975, 976, 976-979, 979, 980, 980, 981, 981-988, 988, 989, 989-994, 994, 995, 995-998, 998, 999, 999, 1000, 1000, 1001, 1001, 1002, 1002, 1003, 1003-1006, 1006, 1007, 1007-1016, 1016, 1017, 1017, 1018, 1018, 1019, 1019-1028, 1028, 1029, 1029-1034, 1034, 1035, 1035-1046, 1046, 1047, 1047-1058, 1058, 1059, 1059, 1060, 1060, 1061, 1061, 1062, 1062, 1063, 1063-1070, 1070, 1071, 1071, 1072, 1072, 1073, 1073, 1074, 1074, 1075, 1075-1078, 1078, 1079, 1079-1084, 1084, 1085, 1085, 1086, 1086, 1087, 1087-1092, 1092, 1093, 1093, 1094, 1094, 1095, 1095-1102, 1102, 1103, 1103-1114, 1114, 1115, 1115-1119, 1119, 1120, 1120-1141, 1141, 1142, 1142-1145, 1145, 1146, 1146, 1147, 1147, 1148, 1148-1151, 1151, 1152, 1152-1154, 1154, 1155, 1155, 1156, 1156, 1157, 1157, 1158, 1158, 1159, 1159.

[0234] In one embodiment of the method, colorectal carcinoma tissue is distinguished from at least one of inflammatory colon tissue and normal colon tissue. This is achieved by analysis of the methylation status of at least one target sequence comprising, or hybridizing under stringent conditions to at least 16 contiguous nucleotides of a sequence selected from the group consisting SEQ ID NOS: 1-3, 5-23, 25-36, 38-49, 51-58 and complements thereof. This is preferably achieved by use of a set consisting of at least one oligonucleotide, and more preferably at least two oligomers comprising at least two oligonucleotides selected from one of the groups consisting of:

[0235] SEQ ID NOS: 89-161, 164-293, 14424-14453; and

[0236] SEQ ID NOS:681-683, 683, 684, 684, 685, 685, 686, 686, 687, 687, 688, 688-691, 691, 692, 692-695, 695, 696, 696-699, 699, 700, 700-709, 709, 710, 710-725, 725, 726, 726, 727, 727, 728, 728-760, 760, 761, 761, 762, 762, 763, 763-784, 784, 785, 785, 786, 786, 787, 787-802, 802, 803, 803-814, 814, 815, 815-832, 832, 833, 833-836, 836, 837, 837-872, 872, 873, 873-876, 876, 877, 877, 878, 878, 879, 879-882, 882, 883, 883-885, 890-892, 892, 893, 893-896, 896, 897, 897-909, 909, 910, 910, 911, 911, 912, 912-915, 915, 916, 916-921, 921-925, 925, 926, 926-939, 939, 940, 940, 941, 941, 942, 942-944, 944-957, 957, 958, 958, 959, 959, 960, 960, 961, 961, 962, 962-971, 971, 972, 972, 973, 973, 974, 974, 975, 975, 976, 976-979, 979, 980, 980, 981, 981-988, 988, 989, 989-994, 994, 995, 995-998, 998, 999, 999, 1000, 1000, 1001, 1001, 1002, 1002, 1003, 1003-1006, 1006, 1007, 1007-1016, 1016, 1017, 1017, 1018, 1018, 1019, 1019-1028, 1028, 1029, 1029-1034, 1034, 1035, 1035-1046, 1046, 1047, 1047-1058, 1058, 1059, 1059, 1060, 1060, 1061, 1061, 1062, 1062, 1063, 1063-1070, 1070, 1071, 1071, 1072, 1072, 1073, 1073, 1074, 1074, 1075, 1075-1078, 1078, 1079, 1079-1084, 1084, 1085, 1085, 1086, 1086, 1087, 1087-1092, 1092, 1093, 1093, 1094, 1094, 1095, 1095-1102, 1102, 1103, 1103-1114, 1114, 1115, 1115-1119, 1119, 1120, 1120-1141, 1141, 1142, 1142.

[0237] In one embodiment of the method, at least one of colorectal carcinoma tissue, or colon adenomas is distinguished from at least one tissue selected from the group consisting of inflammatory colon tissue, normal colon tissue, non-colon healthy tissue, peripheral blood lymphocytes, and non-colon cancer tissue. This is achieved by analysis of the methylation status of at least one target sequence comprising, or hybridizing under stringent conditions to at least 16 contiguous nucleotides of a sequence selected from the group consisting SEQ ID NO: 1-36, 38-43, 45-58 and complements thereof. This is preferably achieved by use of a set consisting of at least one oligonucleotide, and more preferably at least two oligomers comprising at least two oligonucleotides selected from one of the groups consisting of:

[0238] SEQ ID NOS: 89-109, 113-299, 14424-14453; and

[0239] SEQ ID NOS:681-683, 683, 684, 684, 685, 685, 686, 686, 687, 687, 688, 688-691, 691, 692, 692-695, 695, 696, 696-699, 699, 700, 700-709, 709, 710, 710-725, 725, 726, 726, 727, 727, 728, 728-760, 760, 761, 761, 762, 762, 763, 763-777, 784, 784, 785, 785, 786, 786, 787, 787-802, 802, 803, 803-814, 814, 815, 815-832, 832, 833, 833-836, 836, 837, 837-872, 872, 873, 873-876, 876, 877, 877, 878, 878, 879, 879-882, 882, 883, 883-892, 892, 893, 893-896, 896, 897, 897-909, 909, 910, 910, 911, 911, 912,912-915, 915, 916, 916-921, 921-925, 925, 926, 926-939, 939, 940, 940, 941, 941, 942, 942-944, 944-957, 957, 958, 958, 959, 959, 960, 960, 961, 961, 962, 962-971, 971, 972, 972, 973, 973, 974, 974, 975, 975, 976, 976-979, 979, 980, 980, 981, 981-988, 988, 989, 989-994, 994, 995, 995-998, 998, 999, 999, 1000, 1000, 1001, 1001, 1002, 1002, 1003, 1003-1006, 1006, 1007, 1007-1016, 1016, 1017, 1017, 1018, 1018, 1019, 1019-1028, 1028, 1029, 1029-1034, 1034, 1035, 1035-1046, 1046, 1047, 1047-1058, 1058, 1059, 1059, 1060, 1060, 1061, 1061, 1062, 1062, 1063, 1063-1070, 1070, 1071, 1071, 1072, 1072, 1073, 1073, 1074, 1074, 1075, 1075-1078, 1078, 1079, 1079-1084, 1084, 1085, 1085, 1086, 1086, 1087, 1087-1092, 1092, 1093, 1093, 1094, 1094, 1095, 1095-1102,1102,1103, 1103-1114, 1114, 1115, 1115-1119, 1119, 1120, 1120-1141, 1141, 1142, 1142-1145, 1145, 1146, 1146, 1147, 1147, 1148, 1148-1151, 1151, 1152, 1152.

[0240] In one embodiment of the method, tissues originating from the colon are distinguished from tissues of non-colon origin by use of a set of oligomers comprising at least two oligonucleotides selected from one of the groups consisting of:

[0241] SEQ ID NOS: 89-303, 14424-14453; and

[0242] SEQ ID NOS:681-683, 683, 684, 684, 685, 685, 686, 686, 687, 687, 688, 688-691, 691, 692, 692-695, 695, 696, 696-699, 699, 700, 700-709, 709, 710, 710-725, 725, 726, 726, 727, 727, 728, 728-760, 760, 761, 761, 762, 762, 763, 763-784, 784, 785, 785, 786, 786, 787, 787-802, 802, 803, 803-814, 814, 815, 815-832, 832, 833, 833-836, 836, 837, 837-872, 872, 873, 873-876, 876, 877, 877, 878, 878, 879, 879-882, 882, 883, 883-892, 892, 893, 893-896, 896, 897, 897-909, 909, 910, 910, 911, 911, 912, 912-915, 915, 916, 916-921, 921-925, 925, 926, 926-939, 939, 940, 940, 941, 941, 942, 942-944, 944-957, 957, 958, 958, 959, 959, 960, 960, 961, 961, 962, 962-971, 971, 972, 972, 973, 973, 974, 974, 975, 975, 976, 976-979, 979, 980, 980, 981, 981-988, 988, 989, 989-994, 994, 995, 995-998, 998, 999, 999, 1000, 1000, 1001, 1001, 1002, 1002, 1003, 1003-1006, 1006, 1007, 1007-1016, 1016, 1017, 1017, 1018, 1018, 1019, 1019-1028, 1028, 1029, 1029-1034, 1034, 1035, 1035-1046, 1046, 1047, 1047-1058, 1058, 1059, 1059, 1060, 1060, 1061, 1061, 1062, 1062, 1063, 1063-1070, 1070, 1071, 1071, 1072, 1072, 1073, 1073, 1074, 1074, 1075, 1075-1078, 1078, 1079, 1079-1084, 1084, 1085, 1085, 1086, 1086, 1087, 1087-1092, 1092, 1093, 1093, 1094, 1094, 1095, 1095-1102,1102,1103, 1103-1114, 1114, 1115, 1115-1119, 1119, 1120, 1120-1141, 1141, 1142, 1142-1145, 1145, 1146, 1146, 1147, 1147, 1148, 1148-1151, 1151, 1152, 1152-1154, 1154, 1155, 1155, 1156, 1156, 1157, 1157, 1158, 1158, 1159, 1159.

[0243] In one embodiment of the method, cell proliferative disorders are distinguished from healthy tissues by use of a set of oligomers comprising at least two oligonucleotides selected from one of the groups consisting of:

[0244] SEQ ID NOS:89-109, 113-293, 296-299, 14424-14453; and

[0245] SEQ ID NOS:681-683, 683, 684, 684, 685, 685, 686, 686, 687, 687, 688, 688-691, 691, 692, 692-695, 695, 696, 696-699, 699, 700, 700-709, 709, 710, 710-725, 725, 726, 726, 727, 727, 728, 728-760, 760, 761, 761, 762, 762, 763, 763-777, 784, 784, 785, 785, 786, 786, 787, 787-802, 802, 803, 803-814, 814, 815, 815-832, 832, 833, 833-836, 836, 837, 837-872, 872, 873, 873-876, 876, 877, 877, 878, 878, 879, 879-882, 882, 883, 883-892, 892, 893, 893-896, 896, 897, 897-909, 909, 910, 910, 911, 911, 912,912-915, 915, 916, 916-921, 921-925, 925, 926, 926-939, 939, 940, 940, 941, 941, 942, 942-944, 944-957, 957, 958, 958, 959, 959, 960, 960, 961, 961, 962, 962-971, 971, 972, 972, 973, 973, 974, 974, 975, 975, 976, 976-979, 979, 980, 980, 981, 981-988, 988, 989, 989-994, 994, 995, 995-998, 998, 999, 999, 1000, 1000, 1001, 1001, 1002, 1002, 1003, 1003-1006, 1006, 1007, 1007-1016, 1016, 1017, 1017, 1018, 1018, 1019, 1019-1028, 1028, 1029, 1029-1034, 1034, 1035, 1035-1046, 1046, 1047, 1047-1058, 1058, 1059, 1059, 1060, 1060, 1061, 1061, 1062, 1062, 1063, 1063-1070, 1070, 1071, 1071, 1072, 1072, 1073, 1073, 1074, 1074, 1075, 1075-1078, 1078, 1079, 1079-1084, 1084, 1085, 1085, 1086, 1086, 1087, 1087-1092, 1092, 1093, 1093, 1094, 1094, 1095, 1095-1102,1102,1103, 1103-1114, 1114, 1115, 1115-1119, 1119, 1120, 1120-1141, 1141, 1142, 1142, 1145, 1145, 1146, 1146, 1147, 1147, 1148, 1148-1151, 1151, 1152, 1152.

[0246] In a further embodiment of the method aerodigestive cell proliferative disorders of the group consisting lung, liver, pancreas, bile duct, stomach, and colon cancers are detected. This is achieved by analysis of the methylation status of at least This is achieved by analysis of the methylation status of at least one target sequence comprising, or hybridizing under stringent conditions to at least 16 contiguous nucleotides of a sequence selected from the group consisting SEQ ID NO: 20, 41, 35, 3, 39, 33 and complements thereof. The present invention further provides a method for ascertaining genetic and/or epigenetic parameters of the genomic sequences according to SEQ ID NOS:1 to SEQ ID NO:64 within a subject by analyzing cytosine methylation and single nucleotide polymorphisms. Said method comprising contacting a nucleic acid comprising one or more of SEQ ID NOS:1 to SEQ ID NO:64 in a biological sample obtained from said subject with at least one reagent or a series of reagents, wherein said reagent or series of reagents, distinguishes between methylated and non-methylated CpG dinucleotides within the target nucleic acid.

[0247] Preferably, said method comprises the following steps: In the first step, a sample of the tissue to be analysed is obtained. The source may be any suitable source, such as cell lines, histological slides, biopsies, paraffin-embedded tissue, bodily fluids, stool, colonic effluent, urine, blood plasma, blood serum, whole blood, isolated blood cells, cells isolated from the blood and all possible combinations thereof. It is preferred that said sources, of DNA are stool or bodily fluids selected from the group consisting colonic effluent, urine, blood plasma, blood serum, whole blood, isolated blood cells, cells isolated from the blood.

[0248] The genomic DNA is then isolated from the sample. Genomic DNA may be isolated by any means standard in the art, including the use of commercially available kits. Briefly, wherein the DNA of interest is encapsulated in by a cellular membrane the biological sample must be disrupted and lysed by enzymatic, chemical or mechanical means. The DNA solution may then be cleared of proteins and other contaminants e.g. by digestion with proteinase K. The genomic DNA is then recovered from the solution. This may be carried out by means of a variety of methods including salting out, organic extraction or binding of the DNA to a solid phase support. The choice of method will be affected by several factors including time, expense and required quantity of DNA.

[0249] Once the nucleic acids have been extracted, the genomic double stranded DNA is used in the analysis.

[0250] In the second step of the method, the genomic DNA sample is treated in such a manner that cytosine bases which are unmethylated at the 5′-position are converted to uracil, thymine, or another base which is dissimilar to cytosine in terms of hybridization behavior. This will be understood as ‘pretreatment’ or ‘treatment’ herein.

[0251] The above-described treatment of genomic DNA is preferably carried out with bisulfite (hydrogen sulfite, disulfite) and subsequent alkaline hydrolysis which results in a conversion of non-methylated cytosine nucleobases to uracil or to another base which is dissimilar to cytosine in terms of base pairing behavior.

[0252] In the third step of the method, fragments of the treated DNA are amplified, using sets of primer oligonucleotides according to the present invention, and an amplification enzyme. The amplification of several DNA segments can be carried out simultaneously in one and the same reaction vessel. Typically, the amplification is carried out using a polymerase chain reaction (PCR). The set of primer oligonucleotides includes at least two oligonucleotides whose sequences are each reverse complementary, identical, or hybridize under stringent or highly stringent conditions to an at least 16-base-pair long segment of the base sequences of one of SEQ ID NOS:304 to SEQ ID NO:535 and sequences complementary thereto.

[0253] In an alternate embodiment of the method, the methylation status of preselected CpG positions within the nucleic acid sequences comprising one or more of SEQ ID NOS:1 to SEQ ID NO:64 may be detected by use of methylation-specific primer oligonucleotides. This technique (MSP) has been described in U.S. Pat. No. 6,265,171 to Herman. The use of methylation status specific primers for the amplification of bisulfite treated DNA allows the differentiation between methylated and unmethylated nucleic acids. MSP primers pairs contain at least one primer which hybridizes to a bisulfite treated CpG dinucleotide. Therefore, the sequence of said primers comprises at least one CpG dinucleotide. MSP primers specific for non-methylated DNA contain a “T” at the position of the C position in the CpG. Preferably, therefore, the base sequence of said primers is required to comprise a sequence having a length of at least 9 nucleotides which hybridizes to a treated nucleic acid sequence according to one of SEQ ID NOS:304 to SEQ ID NO:535 and sequences complementary thereto, wherein the base sequence of said oligomers comprises at least one CpG dinucleotide.

[0254] In a further preferred embodiment of the method, the MSP primers are selected from the group consisting SEQ ID NOS:2754, 2757, 2759, 2767, 2768, 2772, 2776, 2779, 2784, 2785, 2786, 2789, 2791, 2792, 2794, 2797, 2798, 2801, 2805, 2806, 2809, 2811, 2815, 2817, 2824, 2830, 2832, 2833, 2834, 2838, 2840, 2843, 2846, 2850, 2851, 2853, 2855, 2859, 2866, 2867, 2870, 2871, 2876, 2878, 2881, 2885, 2886, 2892, 2893, 2895, 2896, 2898, 2904, 2912, 2915, 2917, 2919, 2922, 2923, 2929, 2931, 2939, 2941, 2944, 2946, 2948, 2950, 2955, 2956, 2957, 2960, 2962, 2965, 2966, 2967, 2968, 2969, 2971, 2975, 2976, 2977, 2978, 2979, 2980, 2981, 2984, 2988, 2989, 2990, 2992, 2994, 2997, 2999, 3001, 3002, 3004, 3006, 3007, 3008, 3010, 3013, 3014, 3016, 3017, 3018, 3020, 3022, 3025, 2752, 2755, 2760, 2762, 2763, 2764, 2765, 2769, 2771, 2773, 2775, 2777, 2780, 2781, 2782, 2783, 2787, 2788, 2790, 2793, 2795, 2796, 2800, 2802, 2803, 2804, 2808, 2810, 2812, 2814, 2816, 2818, 2820, 2821, 2823, 2825, 2827, 2828, 2829, 2831, 2835, 2836, 2837; 2839, 2841, 2842, 2844, 2845, 2847, 2849, 2852, 2854, 2856, 2858, 2860, 2861, 2862, 2863, 2864, 2865, 2868, 2869, 2872, 2873, 2874, 2875, 2877, 2879, 2880, 2882, 2883, 2884, 2887, 2888, 2889, 2890, 2891, 2894, 2897, 2899, 2901, 2902, 2903, 2905, 2907, 2909, 2911, 2914, 2916, 2918, 2920, 2924, 2926, 2927, 2928, 2930, 2932, 2933, 2934, 2935, 2936, 2937, 2938, 2942, 2945, 2947, 2949, 2951, 2953, 2954, 2958, 2959, 2961, 2963, 2970, 2972, 2973, 2974, 2982, 2985, 2987, 2991, 2993, 2995, 2996, 2998, 3000, 3003, 3005, 3011, 3019, 3021, 3023, 3026, 3027, 3028, 3032, 3033, 3036, 3037, 3038, 3039, 3041, 3042, 3043, 3044, 3047, 3048, 3049, 3052, 3055, 3059, 3061, 3064, 3065, 3068, 3069, 3071, 3072, 3075, 3076, 3080, 3083, 3084, 3085, 3086, 3091, 3093, 3096, 3097, 3100, 3104, 3109, 3110, 3113, 3115, 3117, 3118, 3123, 3126, 3127, 3130, 3134, 3135, 3136, 3138, 3139, 3144, 3146, 3147, 3149, 3150, 3155, 3029, 3031, 3034, 3040, 3045, 3050, 3051, 3053, 3054, 3056, 3057, 3060, 3063, 3066, 3073, 3078, 3081, 3088, 3089, 3090, 3092, 3094, 3098, 3101, 3103, 3105, 3107, 3108, 3111, 3114, 3116, 3119, 3121, 3122, 3124, 3128, 3131, 3133, 3137, 3140, 3142, 3145, 3148, 3151, 3152, 3153, 3157, 3159, 3165, 3166, 3167, 3170, 3171, 3172, 3174, 3175, 3176, 3179, 3180, 3181, 3184, 3185, 3186, 3192, 3194, 3198, 3201, 3202, 3203, 3204, 3206, 3209, 3212, 3213, 3215, 3216, 3217, 3218, 3221, 3224, 3226, 3228, 3229, 3230, 3232, 3233, 3234, 3235, 3237, 3238, 3239, 3245, 3247, 3248, 3249, 3160, 3162, 3163, 3164, 3168, 3169, 3173, 3178, 3182, 3183, 3187, 3189, 3190, 3195, 3196, 3197, 3199, 3205, 3207, 3210, 3214, 3219, 3222, 3223, 3225, 3227, 3236, 3240, 3242, 3243, 3244, 3246, 3250, 3252, 3256, 3261, 3264, 3268, 3269, 3270, 3273, 3275, 3279, 3280, 3281, 3282, 3283, 3284, 3285, 3286, 3290, 3292, 3295, 3297, 3301, 3304, 3305, 3306, 3307, 3308, 3310, 3311, 3312, 3315, 3319, 3320, 3324, 3327, 3331, 3333, 3334, 3339, 3348, 3351, 3354, 3358, 3360, 3364, 3367, 3368, 3374, 3376, 3253, 3255, 3257, 3259, 3260, 3262, 3265, 3266, 3267, 3271, 3274, 3276, 3278, 3287, 3289, 3291, 3293, 3298, 3300, 3302, 3309, 3313, 3314, 3316, 3318, 3321, 3322, 3325, 3328, 3330, 3332, 3335, 3337, 3338, 3340, 3342, 3343, 3344, 3345, 3346, 3347, 3349, 3350, 3352, 3353, 3355, 3356, 3357, 3359, 3361, 3363, 3365, 3369, 3371, 3372, 3373, 3377, 3380, 3383, 3386, 3388, 3389, 3390, 3391, 3392, 3395, 3396, 3400, 3401, 3403, 3406, 3408, 3413, 3414, 3417, 3420, 3423, 3428, 3432, 3433, 3434, 3436, 3439, 3440, 3442, 3443, 3445, 3447, 3453, 3455, 3458, 3463, 3466, 3469, 3470, 3471, 3472, 3473, 3474, 3475, 3477, 3478, 3480, 3481, 3483, 3484, 3487, 3490, 3494, 3495, 3496, 3497, 3499, 3500, 3504, 3505, 3508, 3512, 3514, 3515, 3516, 3521, 3525, 3529, 3533, 3534, 3537, 3538, 3540, 3541, 3542, 3543, 3544, 3547, 3548, 3553, 3557, 3558, 3559, 3560, 3562, 3563, 3566, 3571, 3574, 3575, 3577, 3580, 3583, 3584, 3585, 3586, 3592, 3594, 3595, 3597, 3598, 3599, 3601, 3603, 3604, 3607, 3608, 3612, 3619, 3621, 3622, 3626, 3631, 3632, 3637, 3638, 3639, 3640, 3642, 3643, 3644, 3646, 3647, 3649, 3650, 3652, 3656, 3657, 3660, 3663, 3668, 3670, 3673, 3676, 3677, 3678, 3683, 3688, 3690, 3694, 3697, 3700, 3702, 3703, 3704, 3708, 3404, 3409, 3411, 3415, 3418, 3419, 3421, 3424, 3426, 3427, 3429, 3431, 3435, 3437, 3438, 3441, 3444, 3446, 3448, 3450, 3452, 3454, 3456, 3459, 3461, 3462, 3464, 3467, 3476, 3479, 3482, 3485, 3488, 3489, 3491, 3492, 3493, 3501, 3503, 3506, 3509, 3510, 3511, 3513, 3517, 3518, 3519, 3520, 3522, 3524, 3526, 3527, 3528, 3530, 3531, 3535, 3536, 3545, 3549, 3551, 3552, 3554, 3555, 3556, 3561, 3564, 3565, 3568, 3569, 3570, 3573, 3576, 3578, 3581, 3587, 3588, 3589, 3590, 3591, 3593, 3596, 3600, 3602, 3605, 3606, 3609, 3611, 3613, 3614, 3615, 3616, 3617, 3618, 3623, 3624, 3625, 3627, 3629, 3630, 3633, 3634, 3635, 3636, 3641, 3645, 3651, 3653, 3654, 3655, 3658, 3661, 3662, 3665, 3666, 3667, 3669, 3671, 3674, 3679, 3681, 3684, 3686, 3689, 3691, 3692, 3693, 3695, 3696, 3698, 3701, 3705, 3706, 3707, 3709, 3710, 3714, 3715, 3717, 3718, 3722, 3723, 3729, 3730, 3732, 3735, 3739, 3740, 3741, 3743, 3744, 3745, 3746, 3749, 3753, 3754, 3755, 3756, 3711, 3713, 3719, 3721, 3724, 3725, 3726, 3727, 3728, 3731, 3733, 3736, 3737, 3738, 3742, 3747, 3748, 3750, 3752, 3757, 3758, 3759, 3760, 3761, 3764, 3767, 3771, 3773, 3775, 3776, 3777, 3781, 3785, 3786, 3787, 3790, 3791, 3793, 3796, 3797, 3798, 3799, 3805, 3809, 3814, 3817, 3818, 3822, 3823, 3828, 3833, 3836, 3844, 3847, 3850, 3851, 3853, 3856, 3857, 3862, 3873, 3876, 3877, 3880, 3885, 3887, 3889, 3890, 3892, 3893, 3895, 3896, 3899, 3902, 3903, 3905, 3906, 3907, 3908, 3916, 3923, 3926, 3927, 3930, 3935, 3936, 3938, 3939, 3940, 3944, 3945, 3949, 3950, 3951, 3954, 3955, 3957, 3960, 3965, 3970, 3971, 3978, 3979, 3982, 3983, 3984, 3985, 3762, 3765, 3768, 3770, 3772, 3774, 3778, 3779, 3780, 3782, 3784, 3788, 3792, 3794, 3800, 3801, 3802, 3803, 3804, 3806, 3807, 3808, 3810, 3812, 3813, 3815, 3819, 3820, 3821, 3824, 3826, 3827, 3829, 3831, 3832, 3834, 3837, 3838, 3839, 3840, 3842, 3845, 3848, 3852, 3854, 3858, 3860, 3861, 3863, 3864, 3865, 3866, 3867, 3868, 3869, 3870, 3871, 3872, 3874, 3875, 3878, 3881, 3883, 3884, 3886, 3888, 3891, 3894, 3897, 3898, 3900, 3901, 3904, 3909, 3911, 3914, 3915, 3917, 3919, 3920, 3921, 3922, 3924, 3928, 3931, 3933, 3934, 3937, 3941, 3942, 3943, 3947, 3948, 3952, 3958, 3959, 3961, 3962, 3963, 3964, 3966, 3968, 3972, 3974, 3975, 3976, 3980, 3981, 3986, 3987, 3990, 3993, 3994, 3997, 4000, 4003, 4004, 4006, 4012, 4015, 4017, 4020, 4024, 4027, 4029, 4031, 4032, 4033, 4037, 4038, 4040, 4042, 4047, 4048, 4050, 4051, 4052, 4054, 4055, 4058, 4063, 4066, 4069, 4070, 4072, 4073, 4076, 4078, 4079, 4082, 4083, 4084, 4085, 4086, 4090, 4093, 4094, 4095, 4096, 4099, 4100, 4104, 4106, 4113, 4116, 4119, 4120, 4124, 4127, 4130, 4134, 4135, 4136, 4138, 4142, 4145, 4146, 4149, 4150, 4152, 4153, 4159, 4160, 4161, 4163, 4168, 4169, 4171, 4173, 4176, 4180, 4181, 4185, 4189, 4191, 4192, 4194, 4197, 4198, 4199, 4201, 4206, 4207, 4208, 4213, 4219, 4220, 4223, 4224, 4225, 4228, 4231, 4232, 4233, 4237, 4238, 4242, 4243, 4246, 4247, 4251, 4254, 4255, 4256, 4258, 3988, 3991, 3995, 3998, 4001, 4005, 4007, 4009, 4010, 4011, 4013, 4016, 4018, 4019, 4021, 4022, 4023, 4025, 4028, 4034, 4035, 4039, 4043, 4045, 4046, 4049, 4056, 4059, 4061, 4064, 4065, 4067, 4068, 4071, 4074, 4075, 4077, 4080, 4087, 4088, 4089, 4092, 4098, 4101, 4102, 4105, 4108, 4109, 4110, 4111, 4112, 4114, 4115, 4117, 4121, 4122, 4123, 4125, 4128, 4129, 4131, 4132, 4133, 4137, 4139, 4141, 4144, 4148, 4151, 4154, 4156, 4157, 4162, 4165, 4166, 4167, 4170, 4172, 4174, 4177, 4179, 4182, 4184, 4186, 4188, 4190, 4195, 4196, 4202, 4204, 4205, 4209, 4211, 4214, 4216, 4217, 4218, 4221, 4226, 4229, 4234, 4236, 4239, 4241, 4244, 4245, 4248, 4249, 4252, 4257, 4259, 4260, 4261, 4262, 4266, 4267, 4268, 4271, 4272, 4275, 4276, 4279, 4281, 4282, 4284, 4285, 4287, 4289, 4290, 4292, 4295, 4297, 4299, 4301, 4306, 4310, 4316, 4317, 4318, 4321, 4323, 4325, 4328, 4334, 4335, 4337, 4341, 4342, 4343, 4344, 4348, 4350, 4351, 4352, 4354, 4357, 4358, 4359, 4364, 4365, 4366, 4370, 4371, 4372, 4373, 4376, 4378, 4381, 4383, 4384, 4386, 4388, 4396, 4397, 4399, 4400, 4403, 4405, 4407, 4409, 4412, 4415, 4416, 4417, 4424, 4426, 4429, 4433, 4435, 4437, 4442, 4443, 4447, 4450, 4451, 4452, 4455, 4457, 4460, 4461, 4462, 4465, 4466, 4469, 4470, 4474, 4478, 4481, 4484, 4488, 4491, 4494, 4495, 4497, 4498, 4504, 4506, 4509, 4510, 4511, 4514, 4516, 4518, 4520, 4521, 4523, 4525, 4528, 4530, 4533, 4534, 4535, 4538, 4540, 4542, 4545, 4547, 4548, 4553, 4554, 4555, 4556, 4557, 4562, 4564, 4567, 4568, 4569, 4579, 4580, 4582, 4584, 4587, 4589, 4593, 4596, 4597, 4598, 4600, 4601, 4602, 4605, 4606, 4607, 4609, 4610, 4613, 4614, 4616, 4618, 4621, 4624, 4626, 4627, 4628, 4631, 4632, 4636, 4639, 4641, 4644, 4645, 4648, 4263, 4265, 4269, 4270, 4273, 4274, 4277, 4280, 4283, 4286, 4288, 4291, 4293, 4296, 4298, 4300, 4302, 4303, 4304, 4305, 4307, 4308, 4309, 4311, 4313, 4315, 4319, 4322, 4324, 4326, 4327, 4330, 4331, 4332, 4333, 4336, 4338, 4340, 4345, 4347, 4349, 4353, 4355, 4360, 4361, 4362, 4367, 4368, 4369, 4374, 4375, 4377, 4379, 4382, 4385, 4387, 4389, 4390, 4391, 4392, 4393, 4394, 4395, 4398, 4401, 4406, 4408, 4410, 4411, 4413, 4418, 4420, 4422, 4423, 4425, 4427, 4428, 4430, 4432, 4434, 4436, 4438, 4440, 4441, 4444, 4446, 4448, 4453, 4454, 4456, 4458, 4463, 4464, 4467, 4471, 4472, 4473, 4475, 4476, 4477, 4479, 4480, 4482, 4485, 4486, 4487, 4489, 4490, 4492, 4496, 4499, 4501, 4502, 4503, 4505, 4507, 4508, 4512, 4515, 4517, 4519, 4522, 4524, 4529, 4531, 4536, 4537, 4539, 4541, 4543, 4546, 4549, 4551, 4558, 4559, 4560, 4561, 4563, 4565, 4570, 4571, 4572, 4573, 4574, 4575, 4576, 4578, 4581, 4583, 4585, 4586, 4588, 4590, 4592, 4595, 4599, 4603, 4611, 4612, 4615, 4617, 4619, 4620, 4622, 4630, 4633, 4634, 4635, 4638, 4640, 4642, 4643, 4646, 4647, 4649, 4652, 4655, 4659, 4661, 4663, 4664, 4665, 4668, 4671, 4674, 4675, 4676, 4678, 4680, 4683, 4686, 4690, 4696, 4700, 4703, 4704, 4706, 4709, 4711, 4714, 4715, 4717, 4718, 4719, 4720, 4721, 4726, 4727, 4730, 4732, 4738, 4742, 4745, 4749, 4750, 4753, 4755, 4759, 4763, 4768, 4769, 4772, 4773, 4776, 4778, 4779, 4782, 4784, 4789, 4790, 4794, 4797, 4801, 4805, 4807, 4813, 4814, 4819, 4821, 4822, 4827, 4829, 4833, 4834, 4835, 4837, 4838, 4841, 4842, 4843, 4844, 4847, 4849, 4850, 4852, 4853, 4859, 4860, 4861, 4865, 4867, 4868, 4869, 4870, 4873, 4876, 4877, 4878, 4879, 4883, 4885, 4889, 4891, 4892, 4894, 4895, 4897, 4898, 4903, 4906, 4911, 4912, 4918, 4919, 4920, 4924, 4927, 4929, 4932, 4934, 4941, 4942, 4945, 4948, 4949, 4950, 4650, 4653, 4656, 4658, 4660, 4662, 4666, 4667, 4669, 4670, 4672, 4677, 4681, 4684, 4685, 4687, 4688, 4689, 4691, 4693, 4694, 4695, 4697, 4699, 4701, 4702, 4705, 4707, 4708, 4716, 4722, 4724, 4728, 4731, 4733, 4735, 4736, 4737, 4739, 4741, 4744, 4746, 4748, 4751, 4754, 4756, 4758, 4760, 4761, 4764, 4766, 4767, 4770, 4771, 4774, 4777, 4780, 4783, 4785, 4786, 4787, 4788, 4791, 4792, 4793, 4795, 4798, 4800, 4802, 4804, 4806, 4808, 4810, 4811, 4812, 4815, 4816, 4817, 4818, 4820, 4823, 4824, 4825, 4828, 4830, 4832, 4836, 4839, 4840, 4845, 4846, 4848, 4851, 4854, 4855, 4856, 4857, 4858, 4862, 4864, 4871, 4872, 4874, 4875, 4881, 4882, 4884, 4886, 4887, 4890, 4893, 4896, 4899, 4900, 4901, 4902, 4904, 4905, 4907, 4908, 4909, 4910, 4913, 4915, 4917, 4921, 4922, 4923, 4925, 4926, 4928, 4930, 4935, 4936, 4937, 4938, 4940, 4943, 4944, 4946, 4947, 4951, 4952, 4953, 4954, 4956, 4957, 4960, 4963, 4967, 4970, 4971, 4972, 4976, 4977, 4985, 4986, 4987, 4989, 4991, 4992, 4997, 4999, 5002, 5003, 5004, 5006, 5010, 5013, 5014, 5015, 5017, 5018, 5019, 5020, 5021, 5024, 5025, 5027, 5031, 5032, 5033, 5037, 5040, 5041, 5042, 5043, 4958, 4961, 4964, 4966, 4968, 4969, 4973, 4974, 4975, 4978, 4979, 4980, 4981, 4982, 4983, 4984, 4988, 4990, 4993, 4995, 4996, 4998, 5000, 5005, 5007, 5009, 5011, 5016, 5022, 5026, 5028, 5030, 5034, 5036, 5038, 5039, 5044, 5047, 5049, 5050, 5052, 5054, 5055, 5057, 5060, 5061, 5064, 5045, 5048, 5051, 5053, 5056, 5058, 5062, 5065, 5066, 5069, 5073, 5077, 5080, 5083, 5087, 5093, 5096, 5099, 5100, 5103, 5104, 5106, 5111, 5116, 5119, 5120, 5125, 5128, 5132, 5134, 5135, 5137, 5139, 5140, 5142, 5144, 5148, 5149, 5150, 5155, 5157, 5158, 5160, 5166, 5168, 5170, 5171, 5173, 5176, 5177, 5179, 5184, 5187, 5188, 5190, 5193, 5.195, 5198, 5201, 5204, 5208, 5211, 5215, 5216, 5217, 5220, 5221, 5222, 5224, 5226, 5229, 5230, 5231, 5232, 5234, 5237, 5242, 5244, 5245, 5246, 5247, 5249, 5250, 5252, 5254, 5255, 5256, 5261, 5262, 5264, 5265, 5273, 5274, 5276, 5278, 5279, 5281, 5284, 5285, 5286, 5287, 5288, 5289, 5292, 5296, 5300, 5303, 5304, 5307, 5308, 5309, 5313, 5315, 5317, 5318, 5322, 5323, 5326, 5329, 5330, 5333, 5336, 5337, 5341, 5343, 5348, 5349, 5352, 5354, 5355, 5358, 5359, 5361, 5362, 5363, 5364, 5365, 5367, 5369, 5370, 5372, 5375, 5377, 5379, 5382, 5385, 5387, 5393, 5394, 5395, 5398, 5400, 5404, 5407, 5408, 5409, 5412, 5413, 5414, 5416, 5418, 5421, 5424, 5426, 5428, 5431, 5432, 5433, 5434, 5435, 5437, 5440, 5441, 5443, 5448, 5450, 5451, 5454, 5455, 5458, 5460, 5461, 5464, 5468, 5470, 5471, 5474, 5475, 5477, 5482, 5484, 5485, 5487, 5490, 5491, 5492, 5494, 5496, 5498, 5499, 5500, 5501, 5502, 5503, 5504, 5506, 5509, 5510, 5512, 5516, 5517, 5518, 5524, 5525, 5526, 5528, 5531, 5533, 5534, 5535, 5536, 5537, 5540, 5542, 5544, 5545, 5546, 5549, 5550, 5552, 5553, 5559, 5561, 5566, 5569, 5572, 5573, 5575, 5577, 5578, 5579, 5580, 5581, 5582, 5588, 5593, 5595, 5596, 5598, 5600, 5601, 5603, 5604, 5605, 5608, 5614, 5615, 5616, 5619, 5622, 5624, 5625, 5628, 5629, 5633, 5634, 5637, 5638, 5639, 5643, 5644, 5645, 5647, 5648, 5649, 5650, 5654, 5662, 5664, 5067, 5070, 5072, 5074, 5075, 5076, 5078, 5081, 5084, 5086, 5088, 5090, 5091, 5094, 5097, 5101, 5105, 5107, 5109, 5110, 5112, 5114, 5115, 5117, 5121, 5123, 5124, 5126, 5129, 5131, 5136, 5143, 5145, 5147, 5151, 5153, 5156, 5159, 5161, 5162, 5163, 5164, 5165, 5167, 5169, 5172, 5174, 5175, 5180, 5181, 5182, 5183, 5185, 5186, 5189, 5191, 5194, 5196, 5199, 5200, 5202, 5203, 5205, 5207, 5209, 5210, 5212, 5214, 5218, 5219, 5223, 5225, 5227, 5233, 5235, 5238, 5239, 5240, 5241, 5248, 5251, 5253, 5257, 5259, 5260, 5263, 5266, 5268, 5269, 5270, 5271, 5272, 5280, 5282, 5290, 5291, 5293, 5295, 5297, 5299, 5301, 5306, 5310, 5311, 5312, 5314, 5316, 5319, 5321, 5324, 5327, 5331, 5332, 5334, 5338, 5339, 5340, 5342, 5344, 5346, 5347, 5351, 5353, 5356, 5360, 5366, 5368, 5371, 5373, 5376, 5378, 5380, 5383, 5388, 5389, 5391, 5392, 5396, 5399, 5401, 5403, 5405, 5410, 5415, 5417, 5419, 5420, 5422, 5425, 5427, 5429, 5436, 5438, 5442, 5444, 5445, 5446, 5447, 5449, 5452, 5456, 5457, 5459, 5462, 5465, 5466, 5467, 5469, 5472, 5478, 5480, 5481, 5486, 5488, 5493, 5495, 5497, 5505, 5507, 5508, 5511, 5513, 5515, 5519, 5521, 5522, 5527, 5529, 5532, 5538, 5539, 5541, 5543, 5548, 5551, 5554, 5555, 5556, 5557, 5558, 5560, 5562, 5563, 5564, 5565, 5567, 5568, 5570, 5571, 5574, 5576, 5583, 5585, 5586, 5587, 5589, 5591, 5592, 5594, 5597, 5599, 5602, 5606, 5609, 5611, 5612, 5618, 5620, 5623, 5626, 5627, 5630, 5632, 5635, 5640, 5642, 5646, 5651, 5652, 5656, 5657, 5659, 5660, 5661, 5663, 5665, 5667, 5670, 5672, 5673, 5676, 5678, 5679, 5681, 5682, 5683, 5686, 5687, 5688, 5690, 5694, 5697, 5698, 5699, 5700, 5701, 5704, 5708, 5709, 5711, 5713, 5714, 5717, 5721, 5723, 5724, 5727, 5728, 5733, 5734, 5735, 5736, 5739, 5740, 5741, 5742, 5743, 5668, 5671, 5674, 5677, 5680, 5684, 5689, 5691, 5693, 5696, 5702, 5705, 5707, 5710, 5712, 5715, 5718, 5720, 5722, 5725, 5729, 5730, 5731, 5732, 5737, 5744, 5747, 5750, 5753, 5759, 5762, 5763, 5770, 5775, 5777, 5778, 5780, 5782, 5785, 5787, 5791, 5792, 5793, 5794, 5797, 5801, 5803, 5808, 5810, 5812, 5814, 5816, 5817, 5824, 5832, 5833, 5834, 5835, 5838, 5840, 5841, 5844, 5849, 5853, 5854, 5857, 5859, 5860, 5862, 5863, 5865, 5868, 5874, 5882, 5883, 5885, 5887, 5894, 5895, 5896, 5897, 5902, 5904, 5906, 5.909, 5912, 5915, 5918, 5919, 5920, 5922, 5923, 5926, 5927, 5928, 5930, 5932, 5933, 5934, 5935, 5939, 5940, 5946, 5947, 5948, 5949, 5952, 5954, 5955, 5956, 5958, 5959, 5961, 5962, 5964, 5965, 5968, 5970, 5971, 5972, 5973, 5977, 5978, 5980, 5983, 5986, 5987, 5992, 5993, 5996, 5997, 6000, 6002, 6003, 6004, 6005, 6006, 6008, 6009, 6010, 6011, 6012, 6013, 6017, 6018, 6019, 6020, 6025, 6027, 6030, 6033, 6035, 6036, 6039, 6041, 6042, 6045, 6049, 6050, 6051, 6055, 6059, 6063, 6064, 6065, 6067, 6070, 6072, 6073, 6075, 6077, 6078, 6081, 5745, 5748, 5751, 5754, 5756, 5758, 5760, 5764, 5766, 5767, 5768, 5769, 5771, 5773, 5774, 5776, 5779, 5781, 5783, 5786, 5788, 5789, 5790, 5795, 5796, 5798, 5800, 5802, 5804, 5806, 5807, 5809, 5811, 5813, 5818, 5820, 5821, 5822, 5823, 5825, 5826, 5827, 5828, 5830, 5831, 5836, 5837, 5839, 5842, 5843, 5845, 5846, 5847, 5848, 5850, 5852, 5855, 5856, 5858, 5861, 5864, 5866, 5867, 5870, 5871, 5872, 5873, 5875, 5876, 5877, 5878, 5879, 5880, 5881, 5884, 5886, 5888, 5889, 5890, 5891, 5892, 5893, 5898, 5899, 5900, 5903, 5905, 5907, 5910, 5913, 5916, 5921, 5924, 5929, 5931, 5936, 5937, 5938, 5942, 5943, 5944, 5945, 5950, 5953, 5957, 5960, 5963, 5966, 5969, 5975, 5976, 5981, 5984, 5988, 5990, 5991, 5994, 5998, 5999, 6001, 6007, 6014, 6015, 6016, 6021, 6023, 6024, 6026, 6028, 6031, 6032, 6034, 6037, 6038, 6040, 6043, 6046, 6048, 6053, 6054, 6056, 6058, 6060, 6062, 6066, 6068, 6074, 6076, 6079, 6083, 6084, 6085, 6089, 6090, 6093, 6096, 6098, 6100, 6106, 6110, 6111, 6114, 6118, 6121, 6127, 6130, 6133, 6135, 6137, 6138, 6141, 6143, 6145, 6148, 6150, 6151, 6152, 6153, 6154, 6156, 6159, 6160, 6162, 6163, 6166, 6167, 6168, 6169, 6170, 6171, 6172, 6175, 6177, 6180, 6183, 6187, 6188, 6190, 6193, 6194, 6195, 6196, 6198, 6201, 6202, 6204, 6207, 6211, 6212, 6214, 6215, 6216, 6218, 6219, 6220, 6222, 6225, 6226, 6230, 6235, 6239, 6241, 6242, 6243, 6244, 6245, 6247, 6250, 6252, 6254, 6259, 6260, 6261, 6264, 6265, 6268, 6270, 6273, 6275, 6278, 6280, 6282, 6286, 6287, 6288, 6291, 6293, 6298, 6299, 6300, 6302, 6303, 6305, 6307, 6308, 6312, 6313, 6314, 6315, 6316, 6317, 6318, 6320, 6321, 6323, 6325, 6327, 6328, 6334, 6335, 6337, 6340, 6341, 6344, 6348, 6350, 6353, 6354, 6357, 6360, 6362, 6364, 6368, 6372, 6374, 6377, 6378, 6383, 6386, 6392, 6394, 6398, 6400, 6404, 6405, 6409, 6410, 6411, 6417, 6418, 6424, 6426, 6429, 6431, 6432, 6433, 6435, 6436, 6437, 6438, 6440, 6442, 6445, 6446, 6448, 6449, 6452, 6455, 6457, 6458, 6461, 6462, 6463, 6464, 6465, 6470, 6473, 6475, 6478, 6480, 6481, 6484, 6485, 6486, 6489, 6491, 6492, 6494, 6498, 6502, 6504, 6505, 6507, 6511, 6513, 6514, 6086, 6088, 6091, 6094, 6097, 6099, 6101, 6103, 6105, 6108, 6112, 6115, 6116, 6117, 6119, 6120, 6122, 6123, 6125, 6126, 6128, 6131, 6132, 6134, 6136, 6139, 6142, 6144, 6146, 6149, 6155, 6157, 6161, 6164, 6173, 6174, 6176, 6178, 6181, 6182, 6184, 6186, 6189, 6191, 6192, 6197, 6199, 6200, 6205, 6206, 6208, 6210, 6213, 6221, 6223, 6224, 6227, 6229, 6231, 6232, 6233, 6234, 6236, 6237, 6238, 6240, 6246, 6248, 6251, 6253, 6255, 6256, 6257, 6258, 6262, 6266, 6269, 6271, 6272, 6274, 6276, 6277, 6281, 6283, 6284, 6285, 6289, 6292, 6294, 6295, 6296, 6297, 6301, 6304, 6306, 6309, 6310, 6311, 6319, 6322, 6324, 6326, 6329, 6330, 6331, 6333, 6336, 6338, 6342, 6345, 6347, 6349, 6351, 6355, 6356, 6358, 6359, 6361, 6365, 6367, 6369, 6371, 6373, 6375, 6376, 6379, 6381, 6382, 6384, 6387, 6388, 6389, 6390, 6393, 6395, 6397, 6399, 6401, 6402, 6403, 6406, 6407, 6412, 6413, 6414, 6415, 6416, 6419, 6420, 6421, 6422, 6423, 6425, 6427, 6428, 6434, 6441, 6443, 6444, 6447, 6450, 6451, 6453, 6459, 6460, 6466, 6467, 6468, 6469, 6471, 6472, 6474, 6476, 6479, 6482, 6487, 6490, 6493, 6496, 6497, 6499, 6500, 6501, 6503, 6506, 6508, 6510, 6512, 6515, 6518, 6521, 6522, 6523, 6524, 6528, 6532, 6535, 6539, 6549, 6560, 6561, 6564, 6566, 6567, 6570, 6573, 6576, 6577, 6578, 6579, 6583, 6584, 6585, 6586, 6587, 6590, 6591, 6594, 6596, 6597, 6603, 6605, 6608, 6609, 6610, 6611, 6612, 6615, 6625, 6630, 6632, 6633, 6634, 6638, 6639, 6642, 6643, 6644, 6647, 6650, 6655, 6657, 6658, 6659, 6661, 6663, 6664, 6665, 6669, 6671, 6674, 6677, 6678, 6679, 6680, 6681, 6682, 6686, 6687, 6688, 6689, 6690, 6691, 6693, 6695, 6696, 6697, 6699, 6701, 6703, 6704, 6705, 6706, 6707, 6708, 6710, 6711, 6712, 6713, 6717, 6718, 6720, 6721, 6722, 6725, 6727, 6732, 6734, 6735, 6739, 6741, 6745, 6748, 6751, 6755, 6759, 6762, 6764, 6767, 6770, 6772, 6773, 6774, 6777, 6778, 6782, 6785, 6786, 6787, 6790, 6791, 6794, 6795, 6796, 6798, 6800, 6802, 6803, 6806, 6811, 6814, 6815, 6818, 6824, 6829, 6834, 6835, 6842, 6516, 6519, 6525, 6526, 6527, 6529, 6531, 6533, 6536, 6537, 6538, 6540, 6541, 6542, 6543, 6544, 6545, 6546, 6547, 6548, 6550, 6551, 6552, 6553, 6554, 6556, 6558, 6562, 6563, 6565, 6568, 6571, 6572, 6575, 6580, 6582, 6588, 6589, 6592, 6595, 6598, 6599, 6600, 6601, 6602, 6604, 6606, 6607, 6613, 6614, 6617, 6618, 6619, 6620, 6621, 6623, 6624, 6627, 6628, 6629, 6631, 6635, 6640, 6641, 6645, 6646, 6649, 6651, 6652, 6653, 6656, 6660, 6662, 6666, 6668, 6670, 6672, 6675, 6676, 6683, 6685, 6692, 6694, 6698, 6700, 6702, 6709, 6714, 6715, 6716, 6719, 6723, 6726, 6728, 6730, 6731, 6736, 6738, 6740, 6742, 6744, 6746, 6747, 6749, 6752, 6754, 6756, 6757, 6758, 6760, 6761, 6765, 6769, 6775, 6779, 6781, 6783, 6784, 6789, 6792, 6797, 6799, 6801, 6804, 6805, 6807, 6809, 6810, 6812, 6816, 6817, 6819, 6821, 6822, 6825, 6827, 6828, 6830, 6831, 6832, 6833, 6836, 6837, 6838, 6839, 6840, 6841, 6843,

[0255] Detection: SEQ ID NOS:6517, 6520, 6530, 6534, 6555, 6557, 6559, 6569, 6574, 6581, 6593, 6616, 6622, 6626, 6636, 6637, 6648, 6654, 6667, 6673, 6684, 6724, 6729, 6733, 6737, 6743, 6750, 6753, 6763, 6766, 6768, 6771, 6776, 6780, 6788, 6793, 6808, 6813, 6820, 6823, 6826, 6844, 6848, 6850, 6852, 6854, 6857, 6859, 6861, 6862, 6865, 6868, 6870, 6871, 6872, 6874, 6875, 6876, 6880, 6883, 6886, 6887, 6888, 6890, 6891, 6894, 6896, 6897, 6898, 6899, 6900, 6901, 6902, 6904, 6905, 6906, 6910, 6912, 6917, 6920, 6845, 6847, 6849, 6851, 6853, 6855, 6858, 6860, 6863, 6866, 6869, 6873, 6877, 6879, 6881, 6882, 6884, 6889, 6892, 6893, 6895, 6907, 6908, 6909, 6911, 6913, 6915, 6916, 6918, 6921, 6924, 6927, 6928, 6933, 6935, 6937, 6939, 6940, 6943, 6946, 6947, 6948, 6949, 6951, 6953, 6954, 6955, 6959, 6961, 6964, 6965, 6968, 6969, 6972, 6973, 6976, 6979, 6980, 6922, 6925, 6929, 6930, 6931, 6932, 6934, 6936, 6942, 6944, 6945, 6950, 6952, 6956, 6957, 6958, 6960, 6962, 6963, 6966, 6967, 6970, 6971, 6974, 6975, 6977, 6981, 6983, 6986, 6992, 6995, 6998, 7002, 7006, 7013, 7017, 7022, 7024, 7027, 7030, 7032, 7036, 7037, 7040, 7050, 7052, 7055, 7056, 7058, 7059, 7060, 7064, 7067, 7072, 7074, 7076, 7077, 7084, 7085, 7086, 7087, 7088, 7089, 7090, 7091, 7096, 7097, 7100, 7102, 7109, 7110, 7113, 7114, 7115, 7118, 7121, 7123, 7124, 7131, 7133, 7135, 7136, 7138, 7139, 7140, 7144, 7146, 7148, 7149, 7158, 7159, 7160, 7163, 7165, 7166, 7168, 7172, 7175, 7178, 7180, 7181, 7183, 7185, 7186, 7187, 7192, 7194, 7199, 7202, 7203, 7204, 7205, 7207, 7208, 7213, 7214, 7216, 7220, 7221, 7227, 7228, 7230, 7233, 7235, 7237, 7239, 7243, 7245, 7246, 7248, 7249, 7251, 7255, 7256, 7260, 7263, 7264, 7265, 7266, 7268, 7269, 7272, 7276, 7277, 7278, 7279, 7280, 7281, 7283, 7284, 7287, 7291, 7295, 7299, 7302, 7303, 7306, 7309, 7310, 7311, 7314, 7315, 7320, 7321, 7324, 7325, 7329, 7331, 7332, 7334, 7336, 7339, 7340, 7341, 7344, 7350, 7353, 7355, 7358, 7360, 7362, 7372, 7374, 7375, 7378, 7381, 7385, 7387, 7390, 7391, 7392, 7394, 7397, 7401, 7402, 7405, 7410, 7413, 7415, 7416, 7417, 7420, 6984, 6987, 6989, 6990, 6991, 6993, 6996, 6999, 7001, 7003, 7005, 7007, 7009, 7010, 7011, 7012, 7014, 7016, 7018, 7020, 7023, 7025, 7026, 7028, 7029, 7031, 7033, 7034, 7035, 7038, 7039, 7041, 7042, 7043, 7044, 7045, 7046, 7047, 7048, 7049, 7051, 7053, 7054, 7057, 7061, 7062, 7063, 7065, 7066, 7068, 7070, 7071, 7073, 7075, 7078, 7080, 7081, 7082, 7083, 7092, 7093, 7094, 7095, 7098, 7101, 7103, 7105, 7106, 7107, 7108, 7111, 7112, 7116, 7119, 7122, 7125, 7126, 7127, 7128, 7129, 7130, 7132, 7134, 7137, 7141, 7142, 7143, 7147, 7150, 7152, 7154, 7155, 7156, 7157, 7161, 7167, 7170, 7171, 7173, 7174, 7176, 7177, 7179, 7182, 7184, 7188, 7189, 7190, 7191, 7193, 7195, 7196, 7197, 7198, 7200, 7206, 7210, 7211, 7212, 7215, 7217, 7218, 7219, 7222, 7223, 7224, 7225, 7226, 7229, 7231, 7232, 7236, 7240, 7241, 7242, 7244, 7247, 7250, 7253, 7254, 7257, 7258, 7259, 7261, 7262, 7267, 7270, 7271, 7273, 7274, 7275, 7282, 7285, 7289, 7290, 7292, 7293, 7294, 7296, 7297, 7298, 7301, 7304, 7307, 7308, 7312, 7316, 7317, 7318, 7319, 7322, 7326, 7328, 7330, 7333, 7335, 7337, 7342, 7345, 7347, 7348, 7349, 7351, 7354, 7356, 7357, 7359, 7361, 7363, 7364, 7365, 7366, 7367, 7368, 7369, 7370, 7371, 7373, 7376, 7379, 7382, 7383, 7384, 7386, 7388, 7389, 7393, 7395, 7398, 7400, 7403, 7404, 7407, 7408, 7409, 7411, 7419, 7421, 7422, 7425, 7427, 7435, 7438, 7439, 7440, 7442, 7444, 7448, 7449, 7456, 7459, 7462, 7463, 7465, 7466, 7467, 7470, 7471, 7474, 7476, 7477, 7480, 7481, 7485, 7486, 7489, 7490, 7493, 7496, 7500, 7503, 7508, 7512, 7518, 7519, 7520, 7522, 7524, 7525, 7527, 7528, 7529, 7532, 7540, 7542, 7543, 7545, 7549, 7552, 7554, 7423, 7426, 7428, 7430, 7431, 7432, 7433, 7434, 7436, 7445, 7446, 7447, 7450, 7451, 7452, 7453, 7454, 7455, 7457, 7460, 7464, 7468, 7472, 7475, 7478, 7479, 7482, 7483, 7484, 7487, 7488, 7492, 7494, 7495, 7497, 7498, 7499, 7501, 7505, 7506, 7507, 7509, 7510, 7511, 7513, 7515, 7516, 7517, 7521, 7523, 7526, 7530, 7533, 7534, 7535, 7536, 7537, 7538, 7539, 7541, 7544, 7546, 7547, 7548, 7550, 7555, 7558, 7559, 7560, 7565, 7566, 7567, 7570, 7571, 7573, 7574, 7575, 7576, 7577, 7578, 7579, 7580, 7581, 7582, 7585, 7586, 7587, 7588, 7589, 7590, 7596, 7597, 7598, 7600, 7603, 7606, 7609, 7610, 7615, 7618, 7620, 7621, 7623, 7627, 7629, 7633, 7635, 7636, 7643, 7647, 7651, 7655, 7661, 7666, 7672, 7674, 7676, 7677, 7682, 7683, 7685, 7687, 7689, 7690, 7691, 7694, 7699, 7701, 7702, 7704, 7707, 7709, 7711, 7712, 7713, 7714, 7716, 7718, 7720, 7726, 7728, 7729, 7733, 7734, 7735, 7736, 7738, 7740, 7741, 7744, 7746, 7747, 7748, 7749, 7750, 7751, 7752, 7753, 7754, 7755, 7756, 7758, 7556, 7561, 7563, 7568, 7583, 7584, 7591, 7593, 7594, 7595, 7599, 7601, 7604, 7607, 7608, 7611, 7613, 7614, 7616, 7617, 7619, 7622, 7624, 7626, 7628, 7631, 7637, 7638, 7639, 7640, 7641, 7642, 7644, 7645, 7646, 7649, 7650, 7652, 7654, 7656, 7657, 7658, 7659, 7660, 7662, 7663, 7665, 7667, 7669, 7670, 7671, 7673, 7675, 7678, 7679, 7680, 7681, 7684, 7686, 7688, 7692, 7695, 7697, 7698, 7700, 7703, 7705, 7708, 7710, 7715, 7717, 7719, 7721, 7722, 7723, 7724, 7725, 7727, 7730, 7731, 7732, 7737, 7739, 7742, 7743, 7745, 7757, 7759, 7760, 7761, 7764, 7770, 7774, 7775, 7778, 7782, 7786, 7788, 7795, 7797, 7799, 7805, 7807, 7809, 7810, 7811, 7815, 7817; 7819, 7820, 7822, 7823, 7824, 7828, 7832, 7834, 7837, 7839, 7843, 7845, 7851, 7852, 7857, 7860, 7863, 7865, 7868, 7874, 7881, 7885, 7889, 7892, 7894, 7896, 7900, 7902, 7904, 7907, 7909, 7910, 7913, 7917, 7922, 7925, 7926, 7928, 7933, 7934, 7937, 7941, 7945, 7946, 7948, 7950, 7951, 7952, 7953, 7954, 7955, 7956, 7957, 7963, 7964, 7968, 7971, 7972, 7973, 7976, 7979, 7980, 7981, 7982, 7983, 7985, 7986, 7987, 7988, 7991, 7762, 7765, 7767, 7768, 7771, 7773, 7776, 7779, 7781, 7783, 7784, 7785, 7789, 7791, 7792, 7793, 7794, 7796, 7798, 7800, 7802, 7803, 7808, 7812, 7813, 7814, 7816, 7818, 7821, 7825, 7827, 7829, 7830, 7833, 7835, 7836, 7838, 7840, 7841, 7842, 7844, 7846, 7847, 7848, 7849, 7853, 7854, 7855, 7856, 7858, 7861, 7864, 7866, 7869, 7870, 7871, 7872, 7873, 7875, 7877, 7878, 7879, 7880, 7882, 7884, 7886, 7888, 7890, 7897, 7899, 7903, 7905, 7912, 7914, 7916, 7918, 7919, 7920, 7921, 7923, 7929, 7931, 7932, 7936, 7938, 7939, 7940, 7942, 7943, 7944, 7947, 7949, 7958, 7960, 7962, 7965, 7967, 7969, 7970, 7974, 7977, 7989, 7990, 7992, 7995, 7996, 8000, 8003, 8006, 8007, 8010, 8012, 8015, 8016, 8018, 8019, 8026, 8027, 8030, 8034, 8035, 8038, 8039, 8043, 8044, 8046, 8049, 8050, 8052, 8053, 8055, 8056, 8062, 8064, 8066, 8067, 8068, 8069, 8070, 8071, 8074, 8076, 8077, 8078, 8079, 8080, 8081, 7993, 7997, 7999, 8001, 8004, 8005, 8008, 8009, 8011, 8013, 8017, 8020, 8021, 8022, 8023, 8024, 8025, 8028, 8031, 8033, 8036, 8040, 8042, 8047, 8051, 8054, 8057, 8059, 8060, 8061, 8065, 8072, 8073, 8075, 8082, 8083, 8084, 8085, 8087, 8088, 8089, 8090, 8093, 8095, 8098, 8100, 8101, 8102, 8104, 8107, 8110, 8111, 8114, 8115, 8116, 8118, 8122, 8124, 8126, 8127, 8129, 8132, 8134, 8136, 8138, 8142, 8143, 8144, 8146, 8151, 8157, 8160, 8163, 8165, 8168, 8169, 8170, 8173, 8174, 8175, 8176, 8178, 8181, 8185, 8187, 8188, 8189, 8190, 8191, 8193, 8194, 8200, 8203, 8206, 8208, 8209, 8212, 8214, 8216, 8217, 8220, 8222, 8224, 8228, 8230, 8091, 8094, 8096, 8099, 8103, 8105, 8108, 8112, 8113, 8117, 8119, 8121, 8123, 8125, 8128, 8130, 8131, 8133, 8135, 8137, 8139, 8145, 8147, 8148, 8149, 8150, 8152, 8153, 8154, 8155, 8156, 8158, 8161, 8164, 8166, 8167, 8171, 8177, 8179, 8180, 8182, 8183, 8184, 8186, 8192, 8195, 8197, 8198, 8199, 8201, 8202, 8204, 8207, 8210, 8213, 8218, 8221, 8223, 8225, 8227, 8229, 8231, 8232, 8235, 8236, 8237, 8238, 8244, 8245, 8247, 8250, 8251, 8253, 8254, 8255, 8256, 8258, 8259, 8260, 8263, 8267, 8269, 8270, 8273, 8274, 8277, 8280, 8281, 8289, 8292, 8293, 8294, 8295, 8296, 8297, 8298, 8301, 8305, 8306, 8310, 8311, 8312, 8315, 8317, 8318, 8322, 8323, 8324, 8327, 8328, 8329, 8330, 8333, 8336, 8339, 8340, 8347, 8349, 8350, 8352, 8353, 8356, 8359, 8360, 8366, 8369, 8370, 8372, 8374, 8376, 8377, 8379, 8381, 8382, 8383, 8233, 8239, 8240, 8242, 8243, 8246, 8248, 8252, 8257, 8261, 8264, 8266, 8268, 8271, 8275, 8278, 8282, 8284, 8285, 8286, 8287, 8288, 8291, 8299, 8302, 8303, 8304, 8307, 8309, 8313, 8314, 8316, 8319, 8321, 8325, 8326, 8331, 8332, 8334, 8335, 8337, 8341, 8342, 8343, 8344, 8345, 8346, 8348, 8351, 8354, 8357, 8361, 8362, 8363, 8364, 8365, 8367, 8371, 8373, 8375, 8378, 8384, 8387, 8390, 8391, 8397, 8398, 8401, 8402, 8405, 8406, 8409, 8414, 8418, 8419, 8422, 8425, 8428, 8431, 8432, 8433, 8435, 8437, 8440, 8444, 8449, 8452, 8454, 8455, 8457, 8462, 8464, 8466, 8468, 8469, 8472, 8475, 8476, 8478, 8479, 8481, 8484, 8487, 8488, 8490, 8493, 8496, 8497, 8498, 8501, 8505, 8508, 8511, 8513, 8515, 8517, 8518, 8519, 8521, 8522, 8523, 8526, 8528, 8530, 8531, 8532, 8534, 8536, 8541, 8544, 8547, 8551, 8554, 8556, 8558, 8560, 8562, 8563, 8566, 8567, 8568, 8570, 8571, 8574, 8575, 8576, 8577, 8580, 8581, 8585, 8588, 8591, 8594, 8601, 8602, 8603, 8608, 8609, 8613, 8614, 8617, 8618, 8619, 8620, 8623, 8624, 8628, 8629, 8630, 8633, 8634, 8635, 8636, 8638, 8643, 8645, 8648, 8654, 8657, 8658, 8659, 8660, 8661, 8662, 8666, 8670, 8672, 8674, 8676, 8681, 8683, 8686, 8688, 8689, 8691, 8692, 8693, 8695, 8696, 8700, 8701, 8702, 8703, 8704, 8705, 8709, 8716, 8717, 8719, 8722, 8725, 8727, 8728, 8729, 8732, 8733, 8734, 8735, 8736, 8385, 8388, 8392, 8394, 8395, 8399, 8403, 8407, 8410, 8411, 8412, 8413, 8415, 8416, 8420, 8423, 8424, 8426, 8429, 8434, 8436, 8438, 8442, 8445, 8446, 8447, 8448, 8450, 8451, 8456, 8458, 8460, 8461, 8463, 8465, 8467, 8470, 8473, 8474, 8477, 8480, 8482, 8485, 8486, 8489, 8491, 8492, 8494, 8499, 8500, 8502, 8503, 8504, 8506, 8510, 8512, 8514, 8516, 8520, 8524, 8527, 8529, 8533, 8535, 8537, 8539, 8542, 8545, 8546, 8548, 8550, 8552, 8555, 8557, 8564, 8565, 8569, 8572, 8578, 8582, 8583, 8586, 8587, 8589, 8592, 8595, 8596, 8597, 8598, 8599, 8600, 8604, 8606, 8607, 8610, 8612, 8615, 8616, 8621, 8625, 8627, 8631, 8632, 8637, 8639, 8640, 8641, 8642, 8644, 8646, 8647, 8649, 8650, 8651, 8652, 8653, 8655, 8663, 8665, 8667, 8668, 8669, 8671, 8673, 8675, 8677; 8678, 8679, 8680, 8682, 8684, 8685, 8687, 8690, 8694, 8697, 8698, 8699, 8706, 8707, 8708, 8710, 8711, 8712, 8713, 8714, 8715, 8718, 8720, 8723, 8726, 8730, 8737, 8738, 8741, 8744, 8747, 8750, 8751, 8753, 8754, 8755, 8756, 8759, 8760, 8762, 8763, 8766, 8767, 8768, 8769, 8770, 8772, 8775, 8776, 8777, 8779, 8782, 8783, 8784, 8785, 8786, 8787, 8788, 8789, 8790, 8793, 8794, 8796, 8798, 8799, 8801, 8803, 8804, 8806, 8807, 8809, 8812, 8813, 8815, 8820, 8823, 8826, 8829, 8830, 8832, 8835, 8836, 8837, 8842, 8845, 8846, 8847, 8851, 8853, 8856, 8857, 8859, 8861, 8866, 8739, 8878, 8879, 8880, 8884, 8891, 8893, 8895, 8898, 8900, 8901, 8909, 8912, 8739, 8742, 8745, 8748, 8749, 8752, 8757, 8758, 8761, 8764, 8771, 8773, 8778, 8780, 8791, 8797, 8800, 8802, 8805, 8808, 8810, 8814, 8816, 8818, 8819, 8821, 8824, 8827, 8828, 8831, 8833, 8838, 8840, 8841, 8755, 8843, 8844, 8848, 8850, 8852, 8854, 8855, 8863, 8864, 8865, 8867, 8868, 8869, 8870, 8871, 8872, 8873, 8874, 8876, 8877, 8881, 8882, 8883, 8885, 8887, 8888, 8889, 8890, 8892, 8894, 8896, 8897, 8899, 8902, 8785, 8903, 8904, 8905, 8906, 8907, 8908, 8911, 8913, 8917, 8920, 8923, 8924, 8929, 8931, 8934, 8935, 8936, 8914, 8916, 8918, 8921, 8925, 8927, 8928, 8930, 8932, 8933, 8937, 8980, 8984, 8988, 8989, 8998, 9001, 9002, 9005, 9007, 9008, 9012, 9013, 9016, 9019, 9020, 9022, 9023, 9025, 9028, 9029, 9032, 9033, 9034, 9035, 9037, 9038, 9044, 9046, 9047, 9048, 9049, 9054, 8981, 8983, 8985, 8987, 8990, 8992, 8993, 8994, 8995, 8997, 8999, 9003, 9004, 9006, 9009, 9010, 9011, 9014, 9017, 9018, 9021, 9024, 9026, 9030, 9036, 9039, 9041, 9042, 9043, 9045, 9050, 9051, 9052, 9053, 9055, 9058, 9060, 9063, 9066, 9067, 9068, 9069, 9070, 9071, 9074, 9075, 9077, 9078, 9079, 9080, 9082, 9084, 9088, 9089, 9090, 9099, 9103, 9104, 9105, 9107, 9111, 9056, 9061, 9064, 9072, 9081, 9083, 9085, 9086, 9087, 9091, 9092, 9093, 9094, 9095, 9096, 9097, 9098, 9100, 9102, 9106, 9108, 9109, 9110, 9112, 9113, 9116, 9118, 9125, 9126, 9128, 9129, 9130, 9136, 9141, 9143, 9148, 9150, 9153, 9157, 9158, 9159, 9163, 9164, 9165, 9167, 9168, 9171, 9173, 9177, 9180, 9181, 9182, 9183, 9185, 9187, 9188, 9189, 9191, 9192, 9193, 9194, 9197, 9198, 9200, 9206, 9207, 9208, 9209, 9211, 9216, 9218, 9219, 9220, 9221, 9222, 9223, 9226, 9228, 9229, 9230, 9231, 9232, 9233, 9234, 9237, 9238, 9240, 9243, 9246, 9248, 9253, 9256, 9257, 9260, 9263, 9264, 9266, 9269, 9271, 9279, 9280, 9281, 9282, 9283, 9284, 9290, 9114, 9119, 9121, 9122, 9123, 9124, 9127, 9131, 9133, 9134, 9135, 9137, 9138, 9139, 9140, 9142, 9144, 9146, 9147, 9149, 9151, 9152, 9154, 9155, 9156, 9160, 9162, 9166, 9169, 9172, 9174, 9175, 9176, 9178, 9184, 9186, 9190, 9195, 9199, 9201, 9202, 9203, 9204, 9205, 9212, 9214, 9215, 9217, 9224, 9227, 9235, 9239, 9241, 9244, 9247, 9249, 9251, 9252, 9254, 9258, 9261, 9265, 9267, 9270, 9273, 9274, 9275, 9276, 9277, 9278, 9285, 9286, 9287, 9288, 9289, 9291, 9292, 9295, 9297, 9300, 9302, 9303, 9304, 9307, 9308, 9310, 9311, 9313, 9319, 9321, 9323, 9324, 9328, 9333, 9334, 9337, 9338, 9339, 9342, 9344, 9348, 9351, 9352, 9354, 9355, 9357, 9360, 9367, 9371, 9374, 9377, 9379, 9383, 9384, 9385, 9388, 9389, 9390, 9393, 9394, 9398, 9401, 9402, 9406, 9408, 9409, 9410, 9413, 9415, 9416, 9417, 9418, 9419, 9421, 9422, 9425, 9429, 9433, 9434, 9435, 9436, 9437, 9439, 9440, 9446, 9452, 9453, 9454, 9455, 9457, 9458, 9459, 9462, 9466, 9467, 9468, 9470, 9474, 9479, 9482, 9487, 9488, 9489, 9492, 9495, 9497, 9499, 9500, 9504, 9505, 9508, 9513, 9514, 9519, 9522, 9523, 9524, 9526, 9528, 9532, 9533, 9534, 9535, 9537, 9538, 9541, 9542, 9543, 9545, 9546, 9548, 9293, 9296, 9298, 9301, 9305, 9309, 9312, 9314, 9316, 9317, 9318, 9320, 9322, 9325, 9326, 9327, 9329, 9331, 9332, 9335, 9336, 9340, 9345, 9347, 9349, 9353, 9356, 9358, 9361, 9363, 9364, 9365, 9368, 9370, 9372, 9375, 9376, 9378, 9380, 9382, 9386, 9391, 9395, 9397, 9399, 9400, 9403, 9405, 9407, 9411, 9412, 9414, 9420, 9423, 9424, 9426, 9428, 9430, 9431, 9432, 9438, 9441, 9443, 9444, 9445, 9447, 9448, 9449, 9450, 9451, 9456, 9460, 9461, 9464, 9465, 9469, 9471, 9473, 9475, 9477, 9478, 9480, 9483, 9485, 9490, 9493, 9494, 9496, 9498, 9501, 9502, 9503, 9506, 9509, 9511, 9512, 9515, 9516, 9517, 9518, 9520, 9521, 9525, 9527, 9529, 9530, 9536, 9539, 9544, 9547, 9549, 9550, 9551, 9555, 9556, 9557, 9559, 9560, 9563, 9564, 9565, 9566, 9569, 9570, 9573, 9577, 9578, 9579, 9580, 9585, 9586, 9587, 9588, 9591, 9593, 9596, 9552, 9554, 9558, 9561, 9567, 9571, 9574, 9576, 9581, 9583, 9584, 9589, 9592, 9594, 9595, 9598, 9602, 9604, 9605, 9608, 9612, 9613, 9614, 9617, 9618, 9621, 9622, 9625, 9626, 9627, 9632, 9633, 9638, 9640, 9643, 9644, 9645, 9646, 9651, 9654, 9656, 9657, 9658, 9661, 9662, 9665, 9666, 9667, 9668, 9672, 9673, 9675, 9676, 9677, 9680, 9683, 9686, 9688, 9691, 9694, 9698, 9699, 9702, 9705, 9707, 9710, 9711, 9715, 9719, 9720, 9722, 9723, 9726, 9729, 9732, 9733, 9735, 9737, 9738, 9741, 9744, 9745, 9746, 9747, 9748, 9749, 9750, 9754, 9755, 9756, 9758, 9759, 9768, 9771, 9772, 9776, 9777, 9781, 9782, 9784, 9787, 9789, 9790, 9792, 9796, 9797, 9800, 9805, 9806, 9812, 9815, 9818, 9821, 9823, 9825, 9827, 9831, 9832, 9835, 9837, 9839, 9841, 9842, 9844, 9845, 9851, 9853, 9854, 9855, 9857, 9860, 9862, 9863, 9865, 9871, 9873, 9875, 9878, 9879, 9599, 9601, 9603, 9606, 9607, 9609, 9611, 9615, 9619, 9623, 9624, 9628, 9630, 9631, 9634, 9635, 9637, 9639, 9641, 9647, 9649, 9650, 9652, 9653, 9659, 9660, 9663, 9664, 9670, 9671, 9679, 9682, 9684, 9687, 9690, 9692, 9693, 9695, 9697, 9700, 9701, 9703, 9706, 9708, 9712, 9713, 9714, 9716, 9717, 9718, 9721, 9724, 9727, 9730, 9734, 9739, 9742, 9751, 9753, 9757, 9760, 9761, 9762, 9763, 9764, 9765, 9766, 9767, 9769, 9773, 9775, 9778, 9780, 9783, 9786, 9788, 9791, 9793, 9794, 9795, 9798, 9801, 9803, 9804, 9807, 9808, 9809, 9810, 9811, 9813, 9816, 9817, 9819, 9820, 9822, 9826, 9828, 9830, 9833, 9836, 9838, 9840, 9843, 9846, 9847, 9848, 9849, 9850, 9852, 9856, 9858, 9859, 9861, 9864, 9866, 9867, 9868, 9869, 9870, 9872, 9876, 9877, 9880, 9881, 9882, 9886, 9890, 9891, 9894, 9900, 9902, 9904, 9908, 9911, 9912, 9915, 9917, 9919, 9923, 9925, 9928, 9935, 9936, 9940, 9943, 9949, 9953, 9954, 9956, 9957, 9958, 9962, 9963, 9964, 9968, 9969, 9975, 9978, 9981, 9988, 9989, 9990, 9991, 9992, 9995, 9997, 10011, 10012, 10014, 10017; 10018, 10031, 10032, 10033, 10034, 10035, 10037, 10041, 10042, 10046, 10050, 10054, 10058, 10059, 9883, 9885, 9887, 9889, 9892, 9893, 9895, 9896, 9897, 9898, 9899, 9901, 9903, 9905, 9907, 9909, 9913, 9914, 9916, 9918, 9920, 9921, 9922, 9924, 9926, 9929, 9931, 9932, 9933, 9934, 9937, 9938, 9939, 9941, 9942, 9944, 9945, 9946, 9947, 9948, 9950, 9952, 9955, 9959, 9960, 9961, 9966, 9967, 9970, 9972, 9973, 9974, 9976, 9979, 9980, 9982, 9983, 9984, 9985, 9986, 9987, 9993, 9994, 9996, 9998, 9999, 10000, 10001, 10002, 10003, 10004, 10005, 10006, 10007, 10008, 10009, 10010, 10013, 10015, 10016, 10019, 10020, 10021, 10022, 10023, 10025, 10026, 10027, 10028, 10030, 10036, 10038, 10040, 10043, 10044, 10045, 10047, 10048, 10049, 10051, 10053, 10055, 10056, 10057, 10060, 10061, 10064, 10067, 10068, 10070, 10071, 10072, 10074, 10079, 10081, 10083, 10088, 10091, 10095, 10096, 10097, 10101, 10103, 10105, 10106, 10109, 10110, 10111, 10113, 10116, 10118, 10120, 10122, 10125, 10126, 10127, 10131, 10134, 10137, 10138, 10144, 10147, 10149, 10151, 10152, 10155, 10156, 10159, 10160, 10169, 10172, 10174, 10175, 10178, 10181, 10186, 10188, 10189, 10190, 10191, 10192, 10196, 10199, 10203, 10204, 10210, 10211, 10216, 10218, 10221, 10224, 10225, 10226, 10229, 10230, 10231, 10232, 10234, 10239, 10241, 10244, 10252, 10253, 10257, 10258, 10259, 10261, 10266, 10272, 10276, 10062, 10065, 10069, 10075, 10077, 10078, 10080, 10082, 10084, 10086, 10087, 10089, 10090, 10092, 10093, 10094, 10098, 10099, 10100, 10102, 10104, 10107, 10112, 10114, 10117, 10119, 10121, 10123, 10124, 10129, 10130, 10132, 10133, 10135, 10139, 10140, 10141, 10142, 10143, 10145, 10148, 10150, 10153, 10154, 10157, 10161, 10163, 10164, 10165, 10166, 10167, 10170, 10173, 10176, 10177, 10179, 10182, 10183, 10184, 10187, 10193, 10194, 10195, 10197, 10198, 10200, 10201, 10202, 10205, 10206, 10207, 10209, 10212, 10213, 10214, 10215, 10219, 10220, 10222, 10223, 10227, 10228, 10233, 10235, 10236, 10237, 10240, 10242, 10243, 10245, 10247, 10248, 10249, 10251, 10254, 10255, 10256, 10260, 10262, 10263, 10264, 10265, 10267, 10268, 10269, 10270, 10271, 10273, 10274, 10275, 10277, 10278, 10279, 10282, 10285, 10287, 10291, 10292, 10297, 10299, 10301, 10304, 10306, 10308, 10310, 10314, 10317, 10318, 10320, 10322, 10327, 10329, 10330, 10333, 10335, 10336, 10337, 10340, 10342, 10348, 10350, 10351, 10354, 10358, 10359, 10360, 10362, 10366, 10369, 10372, 10373, 10374, 10376, 10378, 10383, 10385, 10391, 10398, 10403, 10407, 10410, 10413, 10415, 10419, 10422, 10425, 10427, 10428, 10429, 10430, 10432, 10433, 10434, 10437, 10438, 10439, 10442, 10443, 10445, 10446, 10447, 10448, 10452, 10453, 10454, 10455, 10456, 10460, 10463, 10466, 10467, 10469, 10470, 10473, 10475, 10477, 10480, 10484, 10488, 10490, 10494, 10495, 10497, 10501, 10502, 10503, 10507, 10508, 10510, 10517, 10518, 10520, 10522, 10524, 10525, 10528, 10529, 10533, 10536, 10537, 10540, 10541, 10545, 10547, 10551, 10553, 10556, 10559, 10560, 10563, 10564, 10565, 10568, 10571, 10574, 10576, 10579, 10581, 10583, 10588, 10589, 10590, 10592, 10593, 10596, 10597, 10601, 10602, 10603, 10605, 10607, 10609, 10610, 10612, 10613, 10617, 10618, 10621, 10624, 10627, 10630, 10632, 10634, 10637, 10638, 10639, 10640, 10641, 10643, 10645, 10647, 10653, 10655, 10657, 10659, 10661, 10662, 10663, 10664, 10665, 10666, 10667, 10668, 10669, 10672, 10673, 10674, 10675, 10280, 10283, 10286, 10288, 10290, 10293, 10295, 10298, 10300, 10302, 10305, 10307, 10309, 10311, 10312, 10313, 10315, 10319, 10321, 10323, 10325, 10326, 10328, 10331, 10338, 10341, 10343, 10344, 10345, 10346, 10347, 10349, 10352, 10355, 10356, 10357, 10361, 10363, 10365, 10367, 10370, 10375, 10377, 10379, 10380, 10381, 10382, 10384, 10386, 10387, 10388, 10390, 10392, 10394, 10395, 10399, 10401, 10402, 10404, 10406, 10408, 10411, 10412, 10414, 10416, 10417, 10418, 10420, 10423, 10426, 10431, 10435, 10440, 10444, 10449, 10451, 10457, 10459, 10461, 10462, 10464, 10465, 10468, 10471, 10476, 10478, 10481, 10483, 10485, 10487, 10489, 10491, 10492, 10493, 10498, 10499, 10500, 10504, 10506, 10509, 10511, 10513, 10514, 10515, 10516, 10519, 10521, 10523, 10526, 10530, 10531, 10532, 10534, 10535, 10538, 10539, 10542, 10543, 10544, 10546, 10548, 10550, 10552, 10554, 10557, 10558, 10561, 10566, 10569, 10572, 10573, 10577, 10578, 10580, 10582, 10584, 10586, 10594, 10598, 10600, 10604, 10606, 10611, 10614, 10616, 10619, 10622, 10625, 10626, 10628, 10631, 10633, 10635, 10642, 10644, 10646, 10648, 10649, 10650, 10651, 10652, 10654, 10656, 10658, 10660, 10670, 10671, 10676, 10678, 10684, 10679, 10681, 10682, 10683, 10685, 10687, 10688, 10689, 10690, 10691, 10693, 10696, 10699, 10703, 10704, 10709, 10711, 10712,10713, 10720, 10721, 10722,10724, 10725, 10726, 10728, 10729, 10734, 10740, 10742, 10743, 10744, 10745, 10746, 10748, 10749, 10751, 10754, 10758, 10759, 10760, 10764, 10768, 10769, 10772, 10775, 10780, 10781, 10783, 10786, 10791, 10796, 10801, 10808, 10817, 10818, 10819, 10821, 10823, 10826, 10827, 10829, 10830, 10834, 10843, 10844, 10847, 10848, 10849, 10853, 10856, 10858, 10866, 10869, 10872, 10874, 10877, 10878, 10879, 10882, 10884, 10885, 10889, 10892, 10893, 10896, 10900, 10901, 10903, 10905, 10907, 10909, 10910, 10911, 10914, 10916, 10919, 10926, 10930, 10932, 10933, 10934, 10938, 10941, 10942, 10943, 10944, 10946, 10947, 10953, 10955, 10956, 10958, 10959, 10962, 10967, 10968, 10972, 10975, 10977, 10978, 10981, 10984, 10985, 10988, 10992, 10995, 10997, 10999, 11000, 11001, 11006, 11009, 11013, 11016, 11020, 11025, 11033, 11036, 11040, 11041, 11042, 11043, 11045, 11046, 11048, 11052, 11055, 11060, 11061, 11062, 11064, 11065, 11067, 11070, 11071, 11072, 11078, 11079, 11081, 11085, 11093, 10694, 10697, 10700, 10702, 10705, 10707, 10710, 10714, 10716, 10717, 10718, 10719, 10723, 10727, 10730, 10732, 10733, 10735, 10737, 10738, 10739, 10741, 10747, 10750, 10752, 10755, 10757, 10761, 10762, 10763, 10765, 10767, 10770, 10773, 10776, 10778, 10779, 10782, 10784, 10788, 10789, 10790, 10792, 10793, 10794, 10798, 10799, 10800, 10802, 10804, 10805, 10806, 10807, 10809, 10811, 10812, 10813, 10814, 10815, 10816, 10820, 10822, 10824, 10831, 10833, 10835, 10837, 10838, 10839, 10840, 10841, 10842, 10845, 10846, 10850, 10851, 10854, 10857, 10859, 10860, 10861, 10862, 10863, 10864, 10865, 10868, 10870, 10871, 10873, 10875, 10880, 10881, 10883, 10886, 10888, 10890, 10894, 10897, 10899, 10902, 10904, 10906, 10908, 10912, 10915, 10917, 10920, 10922, 10924, 10925, 10927, 10928, 10929, 10931, 10935, 10937, 10939, 10945, 10948, 10950, 10951, 10952, 10954, 10957, 10960, 10963, 10965, 10966, 10969, 10970, 10971, 10973, 10976, 10979, 10980, 10982, 10986, 10987, 10989, 10991, 10993, 10996, 10998, 11002, 11004, 11005, 11007, 11010, 11012, 11014, 11015, 11017, 11019, 11021, 11022, 11023, 11026, 11027, 11028, 11029, 11030, 11031, 11032, 11034, 11037, 11039, 11044, 11047, 11049, 11050, 11051, 11053, 11054, 11056, 11058, 11059, 11063, 11066, 11068, 11069, 11073, 11074, 11075, 11076, 11077, 11080, 11082, 11083, 11084, 11086, 11087, 11088, 11089, 11090, 11091, 11092, 11094, 11376, 11381, 11382, 11383, 11384, 11387, 11.397, 11401, 11405, 11408, 11414, 11418, 11421, 11422, 11424, 11427, 11429, 11430, 11377, 11379, 11380, 11385, 11386, 11388, 11390, 11391, 11392, 11394, 11395, 11396, 11398, 11399, 11400, 11402, 11403, 11404, 11406, 11409, 11410, 11411, 11412, 11415, 11416, 11417, 11419, 11423, 11425, 11428, 11431, 11432, 11433, 11434, 11438, 11442, 11443, 11447, 11449, 11450, 11452, 11456, 11459, 11463, 11464, 11467, 11468, 11472, 11477, 11480, 11481, 11482, 11483, 11484, 11488, 11489, 11493, 11498, 11502, 11504, 11505, 11506, 11507, 11508, 11509, 11512, 11513, 11514, 11517, 11520, 11522, 11523, 11524, 11526, 11528, 11532, 11534, 11435, 11439, 11444, 11445, 11446, 11448, 11451, 11453, 11457, 11458, 11460, 11461, 11462, 11465, 11466, 11469, 11473, 11474, 11475, 11476, 11478, 11479, 11485, 11486, 11487, 11490, 11494, 11497, 11499, 11500, 11501, 11503, 11510, 11511, 11515, 11518, 11519, 11521, 11525, 11527, 11529, 11535, 11539, 11540, 11541, 11548, 11550, 11551, 11552, 11555, 11556, 11557, 11560, 11561, 11562, 11568, 11569, 11571, 11572, 11573, 11577, 11536, 11542,11545, 11546, 11547, 11549, 11553, 11554, 11563, 11566, 11570, 11574, 11578, 11585, 11586, 11590, 11591, 11592, 11595, 11596, 11597, 11600, 11579, 11582, 11587, 11593, 11594, 11598, 11601, 11602, 11606, 11607, 11608, 11609, 11616, 11618, 11622, 11626, 11628, 11632, 11633, 11603, 11610, 11613, 11614, 11615, 11617, 11619, 11623, 11627, 11629, 11634, 11635, 11640, 11641, 11642, 11643, 11647, 11648, 11654, 11655, 11656, 11657, 11658, 11636, 11639, 11644, 11645, 11646, 11649, 11652, 11653, 11659, 11663, 11664, 11665, 11666, 11670, 11671, 11672, 11673, 11677, 11681, 11687, 11690, 11694, 11696, 11697, 11701, 11705, 11709, 11713, 11719, 11723, 11729, 11733, 11739, 11744, 11745, 11748, 11749, 11751, 11755, 11759, 11763, 11770, 11772, 11774, 11776, 11778, 11782, 11785, 11660, 11667, 11674, 11675, 11676, 11678, 11682, 11685, 11686, 11688, 11689, 11691, 11692, 11693, 11695, 11698, 11699, 11700, 11702, 11706, 11710, 11716, 11720, 11724, 11725, 11727, 11728, 11730, 11731, 11732, 11734, 11735, 11736, 11737, 11738, 11740, 11743, 11746, 11747, 11750, 11752, 11756, 11761, 11762, 11764, 11765, 11767, 11768, 11769, 11773, 11775, 11777, 11779, 11783, 11784, 11786, 11790, 11791, 11792, 11787, 11793, 11796, 11800, 11802, 11803, 11805, 11810, 11818, 11819, 11823, 11824, 11827, 11828, 11829, 11833, 11836, 11837, 11839, 11840, 11847, 11850, 11852, 11857, 11860, 11864, 11866, 11797, 11801, 11804, 11806, 11809, 11811, 11814, 11815, 11817, 11820, 11825, 11830, 11835, 11841, 11844, 11845, 11846, 11848, 11851, 11853, 11856, 11858, 11861, 11862, 11863, 11865, 11867, 11871, 11876, 11878, 11882, 11888, 11891, 11894, 11868, 11872, 11875, 11877, 11879, 11883, 11886, 11887, 11889, 11890, 11892, 11893, 11895, 11898, 11902, 11903, 11904, 11908, 11909, 11911, 11912, 11913, 11914, 11915, 11917, 11918, 11922, 11926, 11927, 11930, 11932, 11933, 11937, 11941, 11942, 11946, 11947, 11948, 11949, 11950, 11951, 11952, 11955, 11959, 11968, 11972, 11976, 11978, 11979, 11980, 11981, 11986, 11988, 11989, 11991, 11992, 11995, 11997, 11998, 12001, 12002, 12004, 12005, 11899, 11905, 11910, 11916, 11919, 11923, 11924, 11925, 11928, 11929, 11931, 11934, 11938, 11943, 11953, 11954, 11956, 11960, 11963, 11964, 11967, 11969, 11973, 11977, 11982, 11985, 11987, 11990, 11993, 11994, 11996, 11999, 12000, 12003, 12006, 12011, 12015, 12016, 12017, 12021, 12022, 12023, 12024, 12025, 12026, 12027, 12031, 12034, 12042, 12043, 12045, 12049, 12050, 12051, 12054, 12062, 12063, 12064, 12066, 12067, 12068, 12070, 12072, 12076, 12082, 12085, 12086, 12089, 12090, 12093, 12094, 12095, 12096, 12097, 12098, 12101, 12103, 12107, 12108, 12111, 12112, 12114, 12118, 12119, 12120, 12128, 12007, 12010, 12012, 12020, 12028, 12032, 12033, 12035, 12038, 12039, 12044, 12046, 12052, 12055, 12056, 12057, 12058, 12059, 12060, 12061, 12065, 12069, 12071, 12073, 12077, 12080, 12081, 12084, 12087, 12088, 12091, 12099, 12100, 12102, 12104, 12109, 12110, 12113, 12115, 12121, 12122, 12123, 12124, 12125, 12127, 12129, 12130, 12135, 12136, 12141, 12144, 12147, 12148, 12149, 12153, 12159, 12160, 12131, 12134, 12137, 12138, 12139, 12140, 12142, 12143, 12145, 12146, 12150, 12154, 12157, 12158, 12161, 12162, 12163, 12164, 12168, 12171, 12176, 12181, 12187, 12190, 12194, 12196, 12197, 12199, 12201, 12202, 12209, 12213, 12216, 12220, 12221, 12223, 12225, 12226, 12231, 12233, 12239, 12243, 12244, 12250, 12254, 12256, 12257, 12259, 12266, 12270, 12271, 12272, 12274, 12276, 12277, 12278, 12280, 12284, 12285, 12288, 12289, 12290, 12291, 12295, 12296, 12302, 12308, 12313, 12317, 12321, 12322, 12323, 12324, 12325, 12327, 12328, 12330, 12331, 12332, 12336, 12337, 12339, 12343, 12346, 12349, 12353, 12354, 12355, 12359, 12361, 12363, 12367, 12369, 12370, 12372, 12376, 12377, 12379, 12380, 12381, 12382, 12383, 12385, 12389, 12393, 12398, 12400, 12402, 12403, 12406, 12408, 12409, 12410, 12412, 12415, 12417, 12419, 12422, 12424, 12429, 12430, 12432, 12433, 12435, 12436, 12437, 12441, 12445, 12448, 12449, 12454, 12458, 12459, 12460, 12165, 12169, 12170, 12172, 12175, 12177, 12180, 12182, 12185, 12186, 12188, 12191, 12195, 12198, 12200, 12203, 12206, 12207, 12208, 12210, 12214, 12217, 12222, 12224, 12227, 12228, 12229, 12230, 12232, 12234, 12237, 12238, 12240, 12241, 12242, 12245, 12248, 12249, 12251, 12255, 12258, 12260, 12262, 12263, 12264, 12265, 12267, 12268, 12269, 12273, 12279, 12281, 12286, 12287, 12292, 12297, 12300, 12303, 12306, 12307, 12309, 12312, 12314, 12318, 12326, 12333, 12338, 12340, 12341, 12342, 12345, 12347, 12348, 12352, 12356, 12360, 12362, 12364, 12371, 12373, 12378, 12386, 12390, 12394, 12397, 12401, 12404, 12405, 12411, 12413, 12418, 12420, 12423, 12425, 12428, 12438, 12439, 12440, 12442, 12443, 12446, 12450, 12453, 12455, 12461, 12465, 12467, 12468, 12472, 12474, 12477, 12480, 12484, 12486, 12488, 12489, 12490, 12493, 12495, 12499, 12501, 12504, 12506, 12462, 12469, 12475, 12478, 12481, 12483, 12485, 12487, 12492, 12494, 12496, 12497, 12498, 12500, 12502, 12505, 12507, 12511, 12517, 12520, 12522, 12523, 12524, 12528, 12530, 12534, 12535, 12536, 12537, 12541, 12542, 12547, 12550, 12551, 12552, 12554, 12555, 12560, 12564, 12565, 12569, 12571, 12574, 12579, 12581, 12586, 12590, 12592, 12593, 12594, 12596, 12600, 12601, 12602, 12604, 12610, 12613, 12614, 12615, 12616, 12620, 12626, 12630, 12508, 12512, 12515, 12518, 12521, 12525, 12529, 12531, 12538, 12543, 12546, 12548, 12549, 12553, 12556, 12559, 12561, 12566, 12570, 12572, 12573, 12575, 12578, 12582, 12585, 12587, 12595, 12597, 12599, 12603, 12605, 12608, 12609, 12611, 12617, 12618, 12621, 12624, 12625, 12627, 12631, 12636, 12637, 12638, 12639, 12643, 12647, 12648, 12652, 12654, 12660, 12664, 12666, 12670, 12672, 12675, 12677, 12680, 12686, 12691, 12692, 12695, 12699, 12700, 12701, 12703, 12705, 12709, 12710, 12714, 12715, 12716, 12718, 12719, 12720, 12724, 12725, 12728, 12732, 12738, 12739, 12743, 12744, 12745, 12747, 12748, 12752, 12757, 12763, 12764, 12766, 12767, 12768, 12771, 12776, 12777, 12781, 12785, 12787, 12788, 12791, 12792, 12796, 12797, 12800, 12804, 12808, 12813, 12815, 12816, 12817, 12822, 12825, 12828, 12831, 12833, 12834, 12837, 12839, 12841, 12842, 12632, 12635, 12640, 12641, 12644, 12649, 12653, 12655, 12658, 12661, 12662, 12663, 12665, 12667, 12671, 12673, 12678, 12679, 12681, 12682, 12683, 12684, 12685, 12687, 12688, 12689, 12690, 12693, 12694, 12696, 12702, 12704, 12706, 12712, 12713, 12717, 12721, 12726, 12729, 12730, 12731, 12733, 12736, 12737, 12740, 12746, 12749, 12750, 12751, 12753, 12754, 12755, 12756, 12758, 12760, 12761, 12762, 12765, 12769, 12770, 12772, 12775, 12778, 12782, 12786, 12789, 12790, 12793, 12794, 12795, 12798, 12799, 12801, 12805, 12809, 12812, 12814, 12818, 12821, 12823, 12824, 12826, 12827, 12832, 12835, 12836, 12838, 12840, 12843, 12844, 12845, 12849, 12850, 12854, 12857, 12862, 12866, 12867, 12868, 12870, 12872, 12880, 12881, 12884, 12885, 12889, 12890, 12892, 12896, 12898, 12899, 12903, 12907, 12910, 12913, 12919, 12920, 12921, 12923, 12928, 12932, 12938, 12942, 12945, 12948, 12950, 12951, 12953, 12959, 12846, 12851, 12855, 12858, 12861, 12863, 12869, 12871, 12873, 12876, 12877, 12878, 12879, 12882, 12883, 12886, 12887, 12888, 12891, 12893, 12894, 12895, 12900, 12901, 12902, 12904, 12908, 12909, 12911, 12912, 12914, 12917, 12918, 12924, 12927, 12929, 12933, 12936, 12937, 12939, 12943, 12949, 12954, 12957, 12958, 12960, 12961, 12965, 12969, 12975, 12977, 12962, 12966, 12967, 12968, 12970, 12971, 12972, 12973, 12974, 12976, 12978, 12981, 12982, 12986, 12989, 12991, 12992, 12993, 12995, 12999, 13001, 12983, 12987, 12996, 12997, 12998, 13000, 13002, 13005, 13009, 13013, 13017, 13019, 13025, 13029, 13030, 13032, 13033, 13034, 13037, 13040, 13042, 13043, 13044, 13048, 13049, 13051, 13052, 13053, 13057, 13062, 13064, 13065, 13066, 13067, 13072, 13073, 13076, 13078, 13082, 13083, 13085, 13087, 13088, 13089, 13092, 13096, 13100, 13101, 13102, 13105, 13108, 13109, 13110, 13114, 13117, 13118, 13124, 13129, 13131, 13132, 13138, 13144, 13146, 13147, 13148, 13152, 13156, 13159, 13164, 13167, 13168, 13170, 13171, 13172, 13173, 13174, 13184, 13185, 13006, 13010, 13014, 13018, 13020, 13021, 13022, 13023, 13024, 13026, 13031, 13035, 13036, 13038, 13039, 13041, 13045, 13050, 13054, 13058, 13061, 13063, 13068, 13069, 13070, 13071, 13074, 13075, 13077, 13079, 13084, 13086, 13090, 13091, 13093, 13097, 13104, 13107, 13111, 13115, 13119, 13121, 13122, 13123, 13125, 13126, 13127, 13128, 13130, 13133, 13137, 13139, 13142, 13143, 13145, 13149, 13153, 13157, 13158, 13160, 13163, 13165, 13166, 13169, 13175, 13176, 13177, 13178, 13179, 13180, 13181, 13182, 13183, 13186, 13189, 13190, 13191, 13195, 13196, 13197, 13199, 13200, 13204, 13206, 13192, 13198, 13201, 13207, 13212, 13213, 13226, 13228, 13231, 13235, 13240, 13245, 13247, 13248, 13250, 13254, 13256, 13258, 13264, 13265, 13268, 13269, 13273, 13274, 13277, 13279, 13280, 13281, 13286, 13208, 13211, 13214, 13217, 13220, 13222, 13224, 13225, 13227, 13229, 13232, 13233, 13234, 13237, 13239, 13241, 13242, 13244, 13246, 13249, 13251, 13255, 13257, 13259, 13262, 13263, 13266, 13267, 13270, 13275, 13276, 13282, 13285, 13641, 13645, 13646, 13649, 13650, 13652, 13653, 13654, 13655, 13658, 13659, 13642, 13647, 13648, 13656, 13660, 13661, 13664, 13669, 13670, 13671, 13672, 13673, 13675, 13676, 13677, 13681, 13683, 13685, 13687, 13689, 13691, 13693, 13696, 13665, 13668, 13674, 13678, 13682, 13684, 13686, 13688, 13690, 13692, 13694, 13695, 13697, 13701, 13702, 13703, 13709, 13713, 13714, 13715, 13719, 13721, 13722, 13726, 13728, 13732, 13735, 13740, 13698, 13704, 13705, 13706, 13707, 13708, 13710, 13716, 13717, 13718, 13720, 13723, 13724, 13725, 13727, 13729, 13733, 13734, 13736, 13739, 13741, 13744, 13745, 13749, 13751, 13752, 13753, 13754, 13758, 13762, 13765, 13766, 13768, 13772, 13773, 13774, 13777, 13778, 13779, 13783, 13785, 13790, 13791, 13797, 13802, 13803, 13805, 13806, 13807, 13809, 13812, 13814, 13816, 13817, 13818, 13819, 13820, 13823, 13824, 13826, 13828, 13746, 13755, 13759, 13763, 13764, 13767, 13769, 13775, 13776, 13780, 13784, 13786, 13788, 13789, 13792, 13795, 13796, 13798, 13800, 13804, 13808, 13813, 13815, 13821, 13822,13829, 13832, 13837, 13841, 13844, 13845, 13846, 13849, 13854, 13855, 13856, 13857, 13861, 13865, 13869, 13871, 13875, 13879, 13880, 13833, 13836, 13838, 13843, 13847, 13850, 13853, 13858, 13862, 13866, 13870, 13872, 13876, 13881, 13882, 13883, 13889, 13894, 13902, 13903, 13910, 13911, 13914, 13915, 13916, 13928, 13929, 13930, 13931, 13935, 13936, 13937, 13944, 13947, 13948, 13950, 13960, 13961, 13962, 13964, 13965, 13966, 13968, 13970, 13971, 13972, 13976, 13978, 13884, 13887, 13890, 13893, 13895, 13898, 13900, 13904, 13905, 13906, 13907, 13908, 13909, 13912, 13913, 13917, 13920, 13921, 13922, 13923, 13924, 13925, 13926, 13932, 13938, 13941, 13942, 13943, 13945, 13946, 13949, 13953, 13954, 13956, 13957, 13958, 13959, 13963, 13967, 13969, 13974, 13975, 13977, 13980, 13981, 13988, 13989, 13990, 13992, 13994, 13995, 13999, 13982, 13985, 13986, 13987, 13991, 13993, 13996, 14000, 14001, 14002, 14003, 14004, 14009, 14014, 14017, 14020, 14024, 14026, 14029, 14035, 14036, 14040, 14043, 14045, 14051, 14057, 14058, 14059, 14063, 14065, 14066, 14067, 14068, 14069, 14070, 14071, 14073, 14074, 14078, 14079, 14080, 14081, 14082, 14083, 14084, 14085, 14087, 14094, 14095, 14100, 14108, 14109, 14113, 14114, 14118, 14120, 14121, 14122, 14130, 14133, 14138, 14141, 14142, 14143, 14147, 14005, 14008, 14010, 14013, 14015, 14018, 14021, 14025, 14027, 14028, 14030, 14033, 14034, 14037, 14038, 14039, 14041, 14042, 14044, 14046, 14049, 14050, 14052, 14055, 14056, 14060, 14064, 14072, 14077, 14086, 14088, 14089, 14090, 14091, 14092, 14093, 14096, 14097, 14098, 14099, 14101, 14102, 14103, 14104, 14105, 14106, 14107, 14110, 14115, 14123, 14126, 14127, 14132, 14134, 14135, 14136, 14137, 14139, 14140, 14144, 14145, 14148, 14151, 14155, 14157, 14161, 14166, 14171, 14175, 14183, 14187, 14190, 14192, 14194, 14195, 14196, 14200, 14201, 14152, 14156, 14158, 14162, 14165, 14167, 14170, 14172, 14176, 14179, 14180, 14182, 14184, 14185, 14186, 14188, 14189, 14191, 14193, 14197, 14198, 14199, 14202, 14203, 14204, 14210, 14211, 14216, 14217, 14223, 14226, 14228, 14229, 14230, 14233, 14235, 14239, 14241, 14243, 14244, 14250, 14254, 14255, 14256, 14257, 14260, 14261, 14262, 14267, 14268, 14269, 14273, 14274, 14277, 14281, 14284, 14286, 14289, 14292, 14293, 14297, 14299, 14301, 14304, 14305, 14306, 14312, 14316, 14320, 14322, 14324, 14328, 14329, 14331, 14337, 14342, 14344, 14346, 14347, 14349, 14350, 14353, 14356, 14361, 14363, 14364, 14365, 14366, 14205, 14208, 14212, 14215, 14218, 14221, 14224, 14225, 14227, 14231, 14236, 14240, 14242, 14245, 14246, 14247, 14251, 14263, 14266, 14270, 14278, 14282, 14283, 14285, 14287, 14290, 14291, 14294, 14298, 14300, 14302, 14303, 14307, 14310, 14313, 14317, 14323, 14325, 14327, 14330, 14334, 14338, 14340, 14341, 14345, 14348, 14351, 14352, 14354, 14355, 14357, 14358, 14359, 14360, 14367, 14368, 14372, 14373, 14375, 14386, 14369, 14374, 14376, 14379, 14380, 14381, 14382, 14383, 14384 and SEQ ID NO:14385.

[0256] A further preferred embodiment of the method comprises the use of blocker oligonucleotides. The use of such blocker oligonucleotides has been described by Yu et al., BioTechniques 23:714-720, 1997. Blocking probe oligonucleotides are hybridized to the bisulfite treated nucleic acid concurrently with the PCR primers. PCR amplification of the nucleic acid is terminated at the 5′ position of the blocking probe, such that amplification of a nucleic acid is suppressed where the complementary sequence to the blocking probe is present. The probes may be designed to hybridize to the bisulfite treated nucleic acid in a methylation status specific manner. For example, for detection of methylated nucleic acids within a population of unmethylated nucleic acids, suppression of the amplification of nucleic acids which are unmethylated at the position in question would be carried out by the use of blocking probes comprising a ‘CpA’ or ‘TpA’ at the position in question, as opposed to a ‘CpG’ if the suppression of amplification of methylated nucleic acids is desired.

[0257] For PCR methods using blocker oligonucleotides, efficient disruption of polymerase-mediated amplification requires that blocker oligonucleotides not be elongated by the polymerase. Preferably, this is achieved through the use of blockers that are 3′-deoxyoligonucleotides, or oligonucleotides derivitized at the 3′ position with other than a “free” hydroxyl group. For example, 3′-O-acetyl oligonucleotides are representative of a preferred class of blocker molecule.

[0258] Additionally, polymerase-mediated decomposition of the blocker oligonucleotides should be precluded. Preferably, such preclusion comprises either use of a polymerase lacking 5′-3′ exonuclease activity, or use of modified blocker oligonucleotides having, for example, thioate bridges at the 5′-terminii thereof that render the blocker molecule nuclease-resistant. Particular applications may not require such 5′ modifications of the blocker. For example, if the blocker- and primer-binding sites overlap, thereby precluding binding of the primer (e.g., with excess blocker), degradation of the blocker oligonucleotide will be substantially precluded. This is because the polymerase will not extend the primer toward, and through (in the 5′-3′ direction) the blocker—a process that normally results in degradation of the hybridized blocker oligonucleotide.

[0259] A particularly preferred blocker/PCR embodiment, for purposes of the present invention and as implemented herein, comprises the use of peptide nucleic acid (PNA) oligomers as blocking oligonucleotides. Such PNA blocker oligomers are ideally suited, because they are neither decomposed nor extended by the polymerase.

[0260] Preferably, therefore, the base sequence of said blocking oligonucleotides is required to comprise a sequence having a length of at least 9 nucleotides which hybridizes to a treated nucleic acid sequence according to one of SEQ ID NOS:304 to SEQ ID NO:535 and sequences complementary thereto, wherein the base sequence of said oligonucleotides comprises at least one CpG, TpG or CpA dinucleotide.

[0261] In a further preferred embodiment of the method, the blocking oligonucleotides are selected from the group consisting of SEQ ID NOS:2114, 2119, 2124, 2125, 2127, 2132, 2133, 2135, 2137, 2138, 2139, 2140, 2141, 2142, 2143, 2144, 2146, 2147, 2148, 2149, 2150, 2151, 2152, 2153, 2154, 2155, 2156, 2157, 2158, 2159, 2160, 2031, 2082, 2087, 2089, 2094, 2095, 2096, 2097, 2099, 2107, 1980, 2018, 2022, 2023, 2026, 1939, 1966, 1973, 1974, 1975, 1926, 1930, 1931, 1932, 1933, 1934, 1903, 1917, 1921, 1834, 1896, 1805, 1819, 1821, 1823, 1824, 1825, 1826, 1827, 1828, 1829, 1770, 1782, 1785, 1786, 1788, 1789, 1790, 1792, 1795, 1796, 1797, 1798, 1799, 1800, 1748, 1759, 1760, 1761, 1762, 1763, 1764, 1765, 1724, 1741, 1597, 1609, 1610, 1611, 1612, 1613, 1614, 1615, 1616, 1617, 1618, 1619, 1620, 1621, 1622, 1623, 1624, 1625, 1626, 1627, 1628, 1629, 1630, 1631, 1633, 1634, 1635, 1636, 1637, 1638, 1639, 1640, 1641, 1642, 1643, 1644, 1645, 1646, 1647, 1648, 1649, 1650, 1651, 1652, 1653, 1654, 1655, 1656, 1657, 1658, 1659, 1660, 1661, 1662, 1663, 1668, 1684, 1685, 1686, 1687, 1688, 1689, 1690, 1691, 1692, 1693, 1694, 1695, 1696, 1697, 1698, 1699, 1700, 1701, 1706, 1712, 1713, 1715, 1716, 1717, 1718, 1719, 1571, 1579, 1581, 1584, 1585, 1586, 1587, 1588, 1591, 1592, 1537, 1555, 1556, 1557, 1558, 1559, 1560, 1561, 1562, 1563, 1564, 1565, 1566, 1452, 1455, 1456, 1457, 1458, 1463, 1514, 1515, 1516, 1517, 1518, 1519, 1524, 1525, 1526, 1527, 1528, 1529, 1531, 1532, 1372, 1423, 1424, 1425, 1427, 1432, 1433, 1434, 1435, 1436, 1437, 1440, 1441, 1442, 1443, 1444, 1445, 1446, 1447, 1343, 1358, 1359, 1360, 1361, 1362, 1363, 1364, 1365, 1366, 1367, 1310, 1315, 1316, 1317, 1318, 1319, 1320, 1321, 1322, 1324, 1325, 1327, 1328, 1330, 1332, 1334, 1337, 1338, 1276, 1290, 1305, 1203, 1228, 1238, 1239, 1240, 1247, 1248, 1255, 1256, 1265, 1268, 1269, 1164, 1171, 1172, 1173, 1174, 1176, 1177, 1178, 1179, 1180, 1181, 1182, 1183, 1184, 1185, 1186, 1187, 1188, 1189, 1190, 1191, 1192, 1193, 1194, 1195, 1196, 1197, 1198, 2725, 2748, 2749, 2750, 2710, 2717, 2718, 2719, 2720, 2721, 2684, 2699, 2703, 2704, 2705, 2706, 2658, 2662, 2679, 2603, 2613, 2617, 2585, 2594, 2595, 2596, 2597, 2598, 2599, 2489, 2497, 2498, 2499, 2500, 2501, 2504, 2505, 2507, 2508, 2510, 2511, 2512, 2513, 2514, 2515, 2519, 2520, 2521, 2522, 2525, 2526, 2527, 2528, 2529, 2530, 2531, 2532, 2534, 2535, 2536, 2537, 2539, 2540, 2541, 2542, 2543, 2544, 2545, 2546, 2547, 2550, 2551, 2552, 2553, 2554, 2558, 2563, 2564, 2572, 2580, 2581, 2472, 2482, 2484, 2408, 2464, 2465, 2466, 2467, 2468, 2339, 2349, 2367, 2370, 2372, 2373, 2374, 2375, 2376, 2377, 2378, 2379, 2380, 2382, 2386, 2387, 2389, 2393, 2394, 2395, 2396, 2397, 2398, 2402, 2403, 2404, 2327, 2333, 2334, 2335, 2305, 2315, 2318, 2260, 2268, 2270, 2271, 2272, 2273, 2274, 2275, 2276, 2277, 2278, 2279, 2280, 2281, 2282, 2283, 2284, 2285, 2286, 2287, 2288, 2289, 2290, 2291, 2292, 2293, 2294, 2295, 2296, 2297, 2298, 2299, 2300, 2301, 2232, 2245, 2246, 2248, 2249, 2250, 2251, 2252, 2254, 2255, 2256, 2210, 2218, 2219, 2221, 2222, 2223, 2227, 2228, 2202, 2204, 2205, 2206, 2164, 2180, 2183, 2187, 2188, 2189, 2190, 2191, 2192, 2193, 2194, 2195, 2196, 2197 and 2198.

[0262] The fragments obtained by means of the amplification can carry a directly or indirectly detectable label. Preferred are labels in the form of fluorescence labels, radionuclides, or detachable molecule fragments having a typical mass which can be detected in a mass spectrometer. W here s aid labels are mass labels, it is preferred that the labeled amplificates have a single positive or negative net charge, allowing for better detectability in the mass spectrometer. The detection may be carried out and visualized by means of, e.g., matrix assisted laser desorption/ionization mass spectrometry (MALDI) or using electron spray mass spectrometry (ESI).

[0263] Matrix Assisted Laser Desorption/Ionization Mass Spectrometry (MALDI-TOF) is a very efficient development for the analysis of biomolecules (Karas & Hillenkamp, Anal Chem., 60:2299-301, 1988). An analyte is embedded in a light-absorbing matrix. The matrix is evaporated by a short laser pulse thus transporting the analyte molecule into the vapour phase in an unfragmented manner. The analyte is ionized by collisions with matrix molecules. An applied voltage accelerates the ions into a field-free flight tube. Due to their different masses, the ions are accelerated at different rates. Smaller ions reach the detector sooner than bigger ones. MALDI-TOF spectrometry is well suited to the analysis of peptides and proteins. The analysis of nucleic acids is somewhat more difficult (Gut & Beck, Current Innovations and Future Trends, 1:147-57, 1995). The sensitivity with respect to nucleic acid analysis is approximately 100-times less than for peptides, and decreases disproportionally with increasing fragment size. Moreover, for nucleic acids having a multiply negatively charged backbone, the ionization process via the matrix is considerably less efficient. In MALDI-TOF spectrometry, the selection of the matrix plays an eminently important role. For desorption of peptides, several very efficient matrixes have been found which produce a very fine crystallisation. There are now several responsive matrixes for DNA, however, the difference in sensitivity between peptides and nucleic acids has not been reduced. This difference in sensitivity can be reduced, however, by chemically modifying the DNA in such a manner that it becomes more similar to a peptide. For example, phosphorothioate nucleic acids, in which the usual phosphates of the backbone are substituted with thiophosphates, can be converted into a charge-neutral DNA using simple alkylation chemistry (Gut & Beck, Nucleic Acids Res. 23: 1367-73, 1995). The coupling of a charge tag to this modified DNA results in an increase in MALDI-TOF sensitivity to the same level as that found for peptides. A further advantage of charge tagging is the increased stability of the analysis against impurities, which makes the detection of unmodified substrates considerably more difficult.

[0264] In the fourth step of the method, the amplificates obtained during the third step of the method are analysed in order to ascertain the methylation status of the CpG dinucleotides prior to the treatment.

[0265] In embodiments where the amplificates were obtained by means of MSP amplification, the presence or absence of an amplificate is in itself indicative of the methylation state of the CpG positions covered by the primer, according to the base sequences of said primer.

[0266] Amplificates obtained by means of both standard and methylation specific PCR may be further analyzed by means of hybridization-based methods such as, but not limited to, array technology and probe based technologies as well as by means of techniques such as sequencing and template directed extension.

[0267] In one embodiment of the method, the amplificates synthesised in step three are subsequently hybridized to an array or a set of oligonucleotides and/or PNA probes. In this context, the hybridization takes place in the following manner: the set of probes used during the hybridization is preferably composed of at least 2 oligonucleotides or PNA-oligomers; in the process, the amplificates serve as probes which hybridize to oligonucleotides previously bonded to a solid phase; the non-hybridized fragments are subsequently removed; said oligonucleotides contain at least one base sequence having a length of at least 9 nucleotides which is reverse complementary or identical to a segment of the base sequences specified in the present Sequence Listing; and the segment comprises at least one CpG, TpG or CpA dinucleotide.

[0268] In a preferred embodiment, said dinucleotide is present in the central third of the oligomer. For example, wherein the oligomer comprises one CpG dinucleotide, said dinucleotide is preferably the fifth to ninth nucleotide from the 5′-end of a 13-mer. One oligonucleotide exists for the analysis of each CpG dinucleotide within the sequence according to SEQ ID NOS:1 to SEQ ID NO:64, and the equivalent positions within SEQ ID NOS:304 to SEQ ID NO:535. Said oligonucleotides may also be present in the form of peptide nucleic acids. The non-hybridized amplificates are then removed. The hybridized amplificates are then detected. In this context, it is preferred that labels attached to the amplificates are identifiable at each position of the solid phase at which an oligonucleotide sequence is located.

[0269] In yet a further embodiment of the method, the genomic methylation status of the CpG positions may be ascertained by means of oligonucleotide probes that are hybridised to the bisulfite treated DNA concurrently with the PCR amplification primers (wherein said primers may either be methylation specific or standard).

[0270] A particularly preferred embodiment of this method is the use of fluorescence-based Real Time Quantitative PCR (Heid et al., Genome Res. 6:986-994, 1996; also see U.S. Pat. No. 6,331,393) employing a dual-labeled fluorescent oligonucleotide probe (TaqMan™ PCR, using an ABI Prism 7700 Sequence Detection System, Perkin Elmer Applied Biosystems, Foster City, Calif.). The TaqMan™ PCR reaction employs the use of a nonextendible interrogating oligonucleotide, called a TaqMan™ probe, which, in preferred embodiments, is designed to hybridize to a GpC-rich sequence located between the forward and reverse amplification primers. The TaqMan™ probe further comprises a fluorescent “reporter moiety” and a “quencher moiety” covalently bound to linker moieties (e.g., phosphoramidites) attached to the nucleotides of the TaqMan™ oligonucleotide. For analysis of methylation within nucleic acids subsequent to bisulfite treatment, it is required that the probe be methylation specific, as described in U.S. Pat. No. 6,331,393, (hereby incorporated by reference in its entirety) also known as the MethylLight™ assay. Variations on the TaqMan™ detection methodology that are also suitable for use with the described invention include the use of dual-probe technology (Lightcycler™) or fluorescent amplification primers (Sunrise™ technology). Both these techniques may be adapted in a manner suitable for use with bisulfite treated DNA, and moreover for methylation analysis within CpG dinucleotides.

[0271] A further suitable method for the use of probe oligonucleotides for the assessment of methylation by analysis of bisulfite treated nucleic acids In a further preferred embodiment of the method, the fifth step of the method comprises the use of template-directed oligonucleotide extension, such as MS-SNuPE as described by Gonzalgo & Jones, Nucleic Acids Res. 25:2529-2531, 1997.

[0272] In yet a further embodiment of the method, the fifth step of the method comprises sequencing and subsequent sequence analysis of the amplificate generated in the third step of the method (Sanger F., et al., Proc Natl Acad Sci USA 74:5463-5467, 1977).

### BEST MODE

[0273] In the most preferred embodiment of the method the genomic nucleic acids are isolated and treated according to the first three steps of the method outlined above, namely:

[0274] a) obtaining, from a subject, a biological sample having subject genomic DNA;

[0275] b) extracting or otherwise isolating the genomic DNA;

[0276] c) treating the genomic DNA of b), or a fragment thereof, with one or more reagents to convert cytosine bases that are unmethylated in the 5-position thereof to uracil or to another base that is detectably dissimilar to cytosine in terms of hybridization properties; and wherein

[0277] d) amplifying subsequent to treatment in c) is carried out in a methylation specific manner, namely by use of methylation specific primers or blocking oligonucleotides, and further wherein

[0278] e) detecting of the amplificates is carried out by means of a real-time detection probe, as described above.

[0279] Preferably, where the subsequent amplification of d) is carried out by means of methylation specific primers, as described above, said methylation specific primers comprise a sequence having a length of at least 9 nucleotides which hybridizes to a treated nucleic acid sequence according to one of SEQ ID NOS:304 to SEQ ID NO:535 and sequences complementary thereto, wherein the base sequence of said oligomers comprises at least one CpG dinucleotide.

[0280] In a further preferred embodiment of the method, the MSP primers are selected from the group consisting of SEQ ID NOS:2754, 2757, 2759, 2767, 2768, 2772, 2776, 2779, 2784, 2785, 2786, 2789, 2791, 2792, 2794, 2797, 2798, 2801, 2805, 2806, 2809, 2811, 2815, 2817, 2824, 2830, 2832, 2833, 2834, 2838, 2840, 2843, 2846, 2850, 2851, 2853, 2855, 2859, 2866, 2867, 2870, 2871, 2876, 2878, 2881, 2885, 2886, 2892, 2893, 2895, 2896, 2898, 2904, 2912, 2915, 2917, 2919, 2922, 2923, 2929, 2931, 2939, 2941, 2944, 2946, 2948, 2950, 2955, 2956, 2957, 2960, 2962, 2965, 2966, 2967, 2968, 2969, 2971, 2975, 2976, 2977, 2978, 2979, 2980, 2981, 2984, 2988, 2989, 2990, 2992, 2994, 2997, 2999, 3001, 3002, 3004, 3006, 3007, 3008, 3010, 3013, 3014, 3016, 3017, 3018, 3020, 3022, 3025, 2752, 2755, 2760, 2762, 2763, 2764, 2765, 2769, 2771, 2773, 2775, 2777, 2780, 2781, 2782, 2783, 2787, 2788, 2790, 2793, 2795, 2796, 2800, 2802, 2803, 2804, 2808, 2810, 2812, 2814, 2816, 2818, 2820, 2821, 2823, 2825, 2827, 2828, 2829, 2831, 2835, 2836, 2837, 2839, 2841, 2842, 2844, 2845, 2847, 2849, 2852, 2854, 2856, 2858, 2860, 2861, 2862, 2863, 2864, 2865, 2868, 2869, 2872, 2873, 2874, 2875, 2877, 2879, 2880, 2882, 2883, 2884, 2887, 2888, 2889, 2890, 2891, 2894, 2897, 2899, 2901, 2902, 2903, 2905, 2907, 2909, 2911, 2914, 2916, 2918, 2920, 2924, 2926, 2927, 2928, 2930, 2932, 2933, 2934, 2935, 2936, 2937, 2938, 2942, 2945, 2947, 2949, 2951, 2953, 2954, 2958, 2959, 2961, 2963, 2970, 2972, 2973, 2974, 2982, 2985, 2987, 2991, 2993, 2995, 2996, 2998, 3000, 3003, 3005, 3011, 3019, 3021, 3023, 3026, 3027, 3028, 3032, 3033, 3036, 3037; 3038, 3039, 3041, 3042, 3043, 3044, 3047, 3048, 3049, 3052, 3055, 3059, 3061, 3064, 3065, 3068, 3069, 3071, 3072, 3075, 3076, 3080, 3083, 3084, 3085, 3086, 3091, 3093, 3096, 3097, 3100, 3104, 3109, 3110, 3113, 3115, 3117, 3118, 3123, 3126, 3127, 3130, 3134, 3135, 3136, 3138, 3139, 3144, 3146, 3147, 3149, 3150, 3155, 3029, 3031, 3034, 3040, 3045, 3050, 3051, 3053, 3054, 3056, 3057, 3060, 3063, 3066, 3073, 3078, 3081, 3088, 3089, 3090, 3092, 3094, 3098, 3101, 3103, 3105, 3107, 3108, 3111, 3114, 3116, 3119, 3121, 3122, 3124, 3128, 3131, 3133, 3137, 3140, 3142, 3145, 3148, 3151, 3152, 3153, 3157, 3159, 3165, 3166, 3167, 3170, 3171, 3172, 3174, 3175, 3176, 3179, 3180, 3181, 3184, 3185, 3186, 3192, 3194, 3198, 3201, 3202, 3203, 3204, 3206, 3209, 3212, 3213, 3215, 3216, 3217, 3218, 3221, 3224, 3226, 3228, 3229, 3230, 3232, 3233, 3234, 3235, 3237, 3238, 3239, 3245, 3247, 3248, 3249, 3160, 3162, 3163, 3164, 3168, 3169, 3173, 3178, 3182, 3183, 3187, 3189, 3190, 3195, 3196, 3197, 3199, 3205, 3207, 3210, 3214, 3219, 3222, 3223, 3225, 3227, 3236, 3240, 3242, 3243, 3244, 3246, 3250, 3252, 3256, 3261, 3264, 3268, 3269, 3270, 3273, 3275, 3279, 3280, 3281, 3282, 3283, 3284, 3285, 3286, 3290, 3292, 3295, 3297, 3301, 3304, 3305, 3306, 3307, 3308, 3310, 3311, 3312, 3315, 3319, 3320, 3324, 3327, 3331, 3333, 3334, 3339, 3348, 3351, 3354, 3358, 3360, 3364, 3367, 3368, 3374, 3376, 3253, 3255, 3257, 3259; 3260, 3262, 3265, 3266, 3267, 3271, 3274, 3276, 3278, 3287, 3289, 3291, 3293, 3298, 3300, 3302, 3309, 3313, 3314, 3316, 3318, 3321, 3322, 3325, 3328, 3330, 3332, 3335, 3337, 3338, 3340, 3342, 3343, 3344, 3345, 3346, 3347, 3349, 3350, 3352, 3353, 3355, 3356, 3357, 3359, 3361, 3363, 3365, 3369, 3371, 3372, 3373, 3377, 3380, 3383, 3386, 3388, 3389, 3390, 3391, 3392, 3395, 3396, 3400, 3401, 3403, 3406, 3408, 3413, 3414, 3417, 3420, 3423, 3428, 3432, 3433, 3434, 3436, 3439, 3440, 3442, 3443, 3445, 3447, 3453, 3455, 3458, 3463, 3466, 3469, 3470, 3471, 3472, 3473, 3474, 3475, 3477, 3478, 3480, 3481, 3483, 3484, 3487, 3490, 3494, 3495, 3496, 3497, 3499, 3500, 3504, 3505, 3508, 3512, 3514, 3515, 3516, 3521, 3525, 3529, 3533, 3534, 3537, 3538, 3540, 3541, 3542, 3543, 3544, 3547, 3548, 3553, 3557, 3558, 3559, 3560, 3562, 3563, 3566, 3571, 3574, 3575, 3577, 3580, 3583, 3584, 3585, 3586, 3592, 3594, 3595, 3597, 3598, 3599, 3601, 3603, 3604, 3607, 3608, 3612, 3619, 3621, 3622, 3626, 3631, 3632, 3637, 3638, 3639, 3640, 3642, 3643, 3644, 3646, 3647, 3649, 3650, 3652, 3656, 3657, 3660, 3663, 3668, 3670, 3673, 3676, 3677, 3678, 3683, 3688, 3690, 3694, 3697, 3700, 3702, 3703, 3704, 3708, 3404, 3409, 3411, 3415, 3418, 3419, 3421, 3424, 3426, 3427, 3429, 3431, 3435, 3437, 3438, 3441, 3444, 3446, 3448, 3450, 3452, 3454, 3456, 3459, 3461, 3462, 3464, 3467, 3476, 3479, 3482, 3485, 3488, 3489, 3491, 3492, 3493, 3501, 3503, 3506, 3509, 3510, 3511, 3513, 3517, 3518, 3519, 3520, 3522, 3524, 3526, 3527, 3528, 3530, 3531, 3535, 3536, 3545, 3549, 3551, 3552, 3554, 3555, 3556, 3561, 3564, 3565, 3568, 3569, 3570, 3573, 3576, 3578, 3581, 3587, 3588, 3589, 3590, 3591, 3593, 3596, 3600, 3602, 3605, 3606, 3609, 3611, 3613, 3614, 3615, 3616, 3617, 3618, 3623, 3624, 3625, 3627, 3629, 3630, 3633, 3634, 3635, 3636, 3641, 3645, 3651, 3653, 3654, 3655, 3658, 3661, 3662, 3665, 3666, 3667, 3669, 3671, 3674, 3679, 3681, 3684, 3686, 3689, 3691, 3692, 3693, 3695, 3696, 3698, 3701, 3705, 3706, 3707, 3709, 3710, 3714, 3715, 3717, 3718, 3722, 3723, 3729, 3730, 3732, 3735, 3739, 3740, 3741, 3743, 3744, 3745, 3746, 3749, 3753, 3754, 3755, 3756, 3711, 3713, 3719, 3721, 3724, 3725, 3726, 3727, 3728, 3731, 3733, 3736, 3737, 3738, 3742, 3747, 3748, 3750, 3752, 3757, 3758, 3759, 3760, 3761, 3764, 3767, 3771, 3773, 3775, 3776, 3777, 3781, 3785, 3786, 3787, 3790, 3791, 3793, 3796, 3797, 3798, 3799, 3805, 3809, 3814, 3817, 3818, 3822, 3823, 3828, 3833, 3836, 3844, 3847, 3850, 3851, 3853, 3856, 3857, 3862, 3873, 3876, 3877, 3880, 3885, 3887, 3889, 3890, 3892, 3893, 3895, 3896, 3899, 3902, 3903, 3905, 3906, 3907, 3908, 3916, 3923, 3926, 3927, 3930, 3935, 3936, 3938, 3939, 3940, 3944, 3945, 3949, 3950, 3951, 3954, 3955, 3957, 3960, 3965, 3970, 3971, 3978, 3979, 3982, 3983, 3984, 3985, 3762, 3765, 3768, 3770, 3772, 3774, 3778, 3779, 3780, 3782, 3784, 3788, 3792, 3794, 3800, 3801, 3802, 3803, 3804, 3806, 3807, 3808, 3810, 3812, 3813, 3815, 3819, 3820, 3821, 3824, 3826, 3827, 3829, 3831, 3832, 3834, 3837, 3838, 3839, 3840, 3842, 3845, 3848, 3852, 3854, 3858, 3860, 3861, 3863, 3864, 3865, 3866, 3867, 3868, 3869, 3870, 3871, 3872, 3874, 3875, 3878, 3881, 3883, 3884, 3886, 3888, 3891, 3894, 3897, 3898, 3900, 3901, 3904, 3909, 3911, 3914, 3915, 3917, 3919, 3920, 3921, 3922, 3924, 3928, 3931, 3933, 3934, 3937, 3941, 3942, 3943, 3947, 3948, 3952, 3958, 3959, 3961, 3962, 3963, 3964, 3966, 3968, 3972, 3974, 3975, 3976, 3980, 3981, 3986, 3987, 3990, 3993, 3994, 3997, 4000, 4003, 4004, 4006, 4012, 4015, 4017, 4020, 4024, 4027, 4029, 4031, 4032, 4033, 4037, 4038, 4040, 4042, 4047, 4048, 4050, 4051, 4052, 4054, 4055, 4058, 4063, 4066, 4069, 4070, 4072, 4073, 4076, 4078, 4079, 4082, 4083, 4084, 4085, 4086, 4090, 4093, 4094, 4095, 4096, 4099, 4100, 4104, 4106, 4113, 4116, 4119, 4120, 4124, 4127, 4130, 4134, 4135, 4136, 4138, 4142, 4145, 4146, 4149, 4150, 4152, 4153, 4159, 4160, 4161, 4163, 4168, 4169, 4171, 4173, 4176, 4180, 4181, 4185, 4189, 4191, 4192, 4194, 4197, 4198, 4199, 4201, 4206, 4207, 4208, 4213, 4219, 4220, 4223, 4224, 4225, 4228, 4231, 4232, 4233, 4237, 4238, 4242, 4243, 4246, 4247, 4251, 4254, 4255, 4256, 4258, 3988, 3991, 3995, 3998, 4001, 4005, 4007, 4009, 4010, 4011, 4013, 4016, 4018, 4019, 4021, 4022, 4023, 4025, 4028, 4034, 4035, 4039, 4043, 4045, 4046, 4049, 4056, 4059, 4061, 4064, 4065, 4067, 4068, 4071, 4074, 4075, 4077, 4080, 4087, 4088, 4089, 4092, 4098, 4101, 4102, 4105, 4108, 4109, 4110, 4111, 4112, 4114, 4115, 4117, 4121, 4122, 4123, 4125, 4128, 4129, 4131, 4132, 4133, 4137, 4139, 4141, 4144, 4148, 4151, 4154, 4156, 4157, 4162, 4165, 4166, 4167, 4170, 4172, 4174, 4177, 4179, 4182, 4184, 4186, 4188, 4190, 4195, 4196, 4202, 4204, 4205, 4209, 4211, 4214, 4216, 4217, 4218, 4221, 4226, 4229, 4234, 4236, 4239, 4241, 4244, 4245, 4248, 4249, 4252, 4257, 4259, 4260, 4261, 4262, 4266, 4267, 4268, 4271, 4272, 4275, 4276, 4279, 4281, 4282, 4284, 4285, 4287, 4289, 4290, 4292, 4295, 4297, 4299, 4301, 4306, 4310, 4316, 4317, 4318, 4321, 4323, 4325, 4328, 4334, 4335, 4337, 4341, 4342, 4343, 4344, 4348, 4350, 4351, 4352, 4354, 4357, 4358, 4359, 4364, 4365, 4366, 4370, 4371, 4372, 4373, 4376, 4378, 4381, 4383, 4384, 4386, 4388, 4396, 4397, 4399, 4400, 4403, 4405, 4407, 4409, 4412, 4415, 4416, 4417, 4424, 4426, 4429, 4433, 4435, 4437, 4442, 4443, 4447, 4450, 4451, 4452, 4455, 4457, 4460, 4461, 4462, 4465, 4466, 4469, 4470, 4474, 4478, 4481, 4484, 4488, 4491, 4494, 4495, 4497, 4498, 4504, 4506, 4509, 4510, 4511, 4514, 4516, 4518, 4520, 4521, 4523, 4525, 4528, 4530, 4533, 4534, 4535, 4538, 4540, 4542, 4545, 4547, 4548, 4553, 4554, 4555, 4556, 4557, 4562, 4564, 4567, 4568, 4569, 4579, 4580, 4582, 4584, 4587, 4589, 4593, 4596, 4597, 4598, 4600, 4601, 4602, 4605, 4606, 4607, 4609, 4610, 4613, 4614, 4616, 4618, 4621, 4624, 4626, 4627, 4628, 4631, 4632, 4636, 4639, 4641, 4644, 4645, 4648, 4263, 4265, 4269, 4270, 4273, 4274, 4277, 4280, 4283, 4286, 4288, 4291, 4293, 4296, 4298, 4300, 4302, 4303, 4304, 4305, 4307, 4308, 4309, 4311, 4313, 4315, 4319, 4322, 4324, 4326, 4327, 4330, 4331, 4332, 4333, 4336, 4338, 4340, 4345, 4347, 4349, 4353, 4355, 4360, 4361, 4362, 4367, 4368, 4369, 4374, 4375, 4377, 4379, 4382, 4385, 4387; 4389, 4390, 4391, 4392, 4393, 4394, 4395, 4398, 4401, 4406, 4408, 4410, 4411, 4413, 4418, 4420, 4422, 4423, 4425, 4427, 4428, 4430, 4432, 4434, 4436, 4438, 4440, 4441, 4444, 4446, 4448, 4453, 4454, 4456, 4458, 4463, 4464, 4467, 4471, 4472, 4473, 4475, 4476, 4477; 4479, 4480, 4482, 4485, 4486, 4487, 4489, 4490, 4492, 4496, 4499, 4501, 4502, 4503, 4505, 4507, 4508, 4512, 4515, 4517, 4519, 4522, 4524, 4529, 4531, 4536, 4537, 4539, 4541, 4543, 4546, 4549, 4551, 45.58, 4559, 4560, 4561, 4563, 4565, 4570, 4571, 4572, 4573, 4574, 4575, 4576, 4578, 4581, 4583, 4585, 4586, 4588, 4590, 4592, 4595, 4599, 4603, 4611, 4612, 4615, 4617, 4619, 4620, 4622, 4630, 4633, 4634, 4635, 4638, 4640, 4642, 4643, 4646, 4647, 4649, 4652, 4655, 4659, 4661, 4663, 4664, 4665, 4668, 4671, 4674, 4675, 4676, 4678, 4680, 4683, 4686, 4690, 4696, 4700, 4703, 4704, 4706, 4709, 4711, 4714, 4715, 4717, 4718, 4719, 4720, 4721, 4726, 4727, 4730, 4732, 4738, 4742, 4745, 4749, 4750, 4753, 4755, 4759, 4763, 4768, 4769, 4772, 4773, 4776, 4778, 4779, 4782, 4784, 4789, 4790, 4794, 4797, 4801, 4805, 4807, 4813, 4814, 4819, 4821, 4822, 4827, 4829, 4833, 4834, 4835, 4837, 4838, 4841, 4842, 4843, 4844, 4847, 4849, 4850, 4852, 4853, 4859, 4860, 4861, 4865, 4867, 4868, 4869, 4870, 4873, 4876, 4877, 4878, 4879, 4883, 4885, 4889, 4891, 4892, 4894, 4895, 4897, 4898, 4903, 4906, 4911, 4912, 4918, 4919, 4920, 4924, 4927, 4929, 4932, 4934, 4941, 4942, 4945, 4948, 4949, 4950, 4650, 4653, 4656, 4658, 4660, 4662, 4666, 4667, 4669, 4670, 4672, 4677, 4681, 4684, 4685, 4687, 4688, 4689, 4691, 4693, 4694, 4695, 4697, 4699, 4701, 4702, 4705, 4707, 4708, 4716, 4722, 4724, 4728, 4731, 4733, 4735, 4736, 4737, 4739, 4741, 4744, 4746, 4748, 4751, 4754, 4756, 4758, 4760, 4761, 4764, 4766, 4767, 4770, 4771, 4774, 4777, 4780, 4783, 4785, 4786, 4787, 4788, 4791, 4792, 4793, 4795, 4798, 4800, 4802, 4804, 4806, 4808, 4810, 4811, 4812, 4815, 4816, 4817, 4818, 4820, 4823, 4824, 4825, 4828, 4830, 4832, 4836, 4839, 4840, 4845, 4846, 4848, 4851, 4854, 4855, 4856, 4857, 4858, 4862, 4864, 4871, 4872, 4874, 4875, 4881, 4882, 4884, 4886, 4887, 4890, 4893, 4896, 4899, 4900, 4901, 4902, 4904, 4905, 4907, 4908, 4909, 4910, 4913, 4915, 4917, 4921, 4922, 4923, 4925, 4926, 4928, 4930, 4935, 4936, 4937, 4938, 4940, 4943, 4944, 4946, 4947, 4951, 4952, 4953, 4954, 4956, 4957, 4960, 4963, 4967, 4970, 4971, 4972, 4976, 4977, 4985, 4986, 4987, 4989, 4991, 4992, 4997, 4999, 5002, 5003, 5004, 5006, 5010, 5013, 5014, 5015, 5017, 5018, 5019, 5020, 5021, 5024, 5025, 5027, 5031, 5032, 5033, 5037, 5040, 5041, 5042, 5043, 4958, 4961, 4964, 4966, 4968, 4969, 4973, 4974, 4975, 4978, 4979, 4980, 4981, 4982, 4983, 4984, 4988, 4990, 4993, 4995, 4996, 4998, 5000, 5005, 5007, 5009, 5011, 5016, 5022, 5026, 5028, 5030, 5034, 5036, 5038, 5039, 5044, 5047, 5049, 5050, 5052, 5054, 5055, 5057, 5060, 5061, 5064, 5045, 5048, 5051, 5053, 5056, 5058, 5062, 5065, 5066, 5069, 5073, 5077, 5080, 5083, 5087, 5093, 5096, 5099, 5100, 5103, 5104, 5106, 5111, 5116, 5119, 5120, 5125, 5128, 5132, 5134, 5135, 5137, 5139, 5140, 5142, 5144, 5148, 5149, 5150, 5155, 5157, 5158, 5160, 5166, 5168, 5170, 5171, 5173, 5176, 5177, 5179, 5184, 5187, 5188, 5190, 5193, 5195, 5198, 5201, 5204, 5208, 5211, 5215, 5216, 5217, 5220, 5221, 5222, 5224, 5226, 5229, 5230, 5231, 5232, 5234, 5237, 5242, 5244, 5245, 5246, 5247, 5249, 5250, 5252, 5254, 5255, 5256, 5261, 5262, 5264, 5265, 5273, 5274, 5276, 5278, 5279, 5281, 5284, 5285, 5286, 5287, 5288, 5289, 5292, 5296, 5300, 5303, 5304, 5307, 5308, 5309, 5313, 5315, 5317, 5318, 5322, 5323, 5326, 5329, 5330, 5333, 5336, 5337, 5341, 5343, 5348, 5349, 5352, 5354, 5355, 5358, 5359, 5361, 5362, 5363, 5364, 5365, 5367, 5369, 5370, 5372, 5375, 5377, 5379, 5382, 5385, 5387, 5393, 5394, 5395, 5398, 5400, 5404, 5407, 5408, 5409, 5412, 5413, 5414, 5416, 5418, 5421, 5424, 5426, 5428, 5431, 5432, 5433, 5434, 5435, 5437, 5440, 5441, 5443, 5448, 5450, 5451, 5454, 5455, 5458, 5460, 5461, 5464, 5468, 5470, 5471, 5474, 5475, 5477, 5482, 5484, 5485, 5487, 5490, 5491, 5492, 5494, 5496, 5498, 5499, 5500, 5501, 5502, 5503, 5504, 5506, 5509, 5510, 5512, 5516, 5517, 5518, 5524, 5525, 5526, 5528, 5531, 5533, 5534, 5535, 5536, 5537, 5540, 5542, 5544, 5545, 5546, 5549, 5550, 5552, 5553, 5559, 5561, 5566, 5569, 5572, 5573, 5575, 5577, 5578, 5579, 5580, 5581, 5582, 5588, 5593, 5595, 5596, 5598, 5600, 5601, 5603, 5604, 5605, 5608, 5614, 5615, 5616, 5619, 5622, 5624, 5625, 5628, 5629, 5633, 5634, 5637, 5638, 5639, 5643, 5644, 5645, 5647, 5648, 5649, 5650, 5654, 5662, 5664, 5067, 5070, 5072, 5074, 5075, 5076, 5078, 5081, 5084, 5086, 5088, 5090, 5091, 5094, 5097, 5101, 5105, 5107, 5109, 5110, 5112, 5114, 5115, 5117, 5121, 5123, 5124, 5126, 5129, 5131, 5136, 5143, 5145, 5147, 5151, 5153, 5156, 5159, 5161, 5162, 5163, 5164, 5165, 5167, 5169, 5172, 5174, 5175, 5180, 5181, 5182, 5183, 5185, 5186, 5189, 5191, 5194, 5196, 5199, 5200, 5202, 5203, 5205, 5207, 5209, 5210, 5212, 5214, 5218, 5219, 5223, 5225, 5227, 5233, 5235, 5238, 5239, 5240, 5241, 5248, 5251, 5253, 5257, 5259, 5260, 5263, 5266, 5268, 5269, 5270, 5271, 5272, 5280, 5282, 5290, 5291, 5293, 5295, 5297, 5299, 5301, 5306, 5310, 5311, 5312, 5314, 5316, 5319, 5321, 5324, 5327, 5331, 5332, 5334, 5338, 5339, 5340, 5342, 5344, 5346, 5347, 5351, 5353, 5356, 5360, 5366, 5368, 5371, 5373, 5376, 5378, 5380, 5383, 5388, 5389, 5391, 5392, 5396, 5399, 5401, 5403, 5405, 5410, 5415, 5417, 5419, 5420, 5422, 5425, 5427, 5429, 5436, 5438, 5442, 5444, 5445, 5446, 5447, 5449, 5452, 5456, 5457, 5459, 5462, 5465, 5466, 5467, 5469, 5472, 5478, 5480, 5481, 5486, 5488, 5493, 5495, 5497, 5505, 5507, 5508, 5511, 5513, 5515, 5519, 5521, 5522, 5527, 5529, 5532, 5538, 5539, 5541, 5543, 5548, 5551, 5554, 5555, 5556, 5557, 5558, 5560, 5562, 5563, 5564, 5565, 5567, 5568, 5570, 5571, 5574, 5576, 5583, 5585, 5586, 5587, 5589, 5591, 5592, 5594, 5597, 5599, 5602, 5606, 5609, 5611, 5612, 5618, 5620, 5623, 5626, 5627, 5630, 5632, 5635, 5640, 5642, 5646, 5651, 5652, 5656, 5657, 5659, 5660, 5661, 5663, 5665, 5667, 5670, 5672, 5673, 5676, 5678, 5679, 5681, 5682, 5683, 5686, 5687, 5688, 5690, 5694, 5697, 5698, 5699, 5700, 5701, 5704, 5708, 5709, 5711, 5713, 5714, 5717, 5721, 5723, 5724, 5727, 5728, 5733, 5734, 5735, 5736, 5739, 5740, 5741, 5742, 5743, 5668, 5671, 5674, 5677, 5680, 5684, 5689, 5691, 5693, 5696, 5702, 5705, 5707, 5710, 5712, 5715, 5718, 5720, 5722, 5725, 5729, 5730, 5731, 5732, 5737, 5744, 5747, 5750, 5753, 5759, 5762, 5763, 5770, 5775, 5777, 5778, 5780, 5782, 5785, 5787, 5791, 5792, 5793, 5794, 5797, 5801, 5803, 5808, 5810, 5812, 5814, 5816, 5817, 5824, 5832, 5833, 5834, 5835, 5838, 5840, 5841, 5844, 5849, 5853, 5854, 5857, 5859, 5860, 5862, 5863, 5865, 5868, 5874, 5882, 5883, 5885, 5887, 5894, 5895, 5896, 5897, 5902, 5904, 5906, 5909, 5912, 5915, 5918, 5919, 5920, 5922, 5923, 5926, 5927, 5928, 5930, 5932, 5933, 5934, 5935, 5939, 5940, 5946, 5947, 5948, 5949, 5952, 5954, 5955, 5956, 5958, 5959, 5961, 5962, 5964, 5965, 5968, 5970, 5971, 5972, 5973, 5977, 5978, 5980, 5983, 5986, 5987, 5992, 5993, 5996, 5997, 6000, 6002, 6003, 6004, 6005, 6006, 6008, 6009, 6010, 6011, 6012, 6013, 6017, 6018, 6019, 6020, 6025, 6027, 6030, 6033, 6035, 6036, 6039, 6041, 6042, 6045, 6049, 6050, 6051, 6055, 6059, 6063, 6064, 6065, 6067, 6070, 6072, 6073, 6075, 6077, 6078, 6081, 5745, 5748, 5751, 5754, 5756, 5758, 5760, 5764, 5766, 5767, 5768, 5769; 5771, 5773, 5774, 5776, 5779, 5781, 5783, 5786, 5788, 5789, 5790, 5795, 5796, 5798, 5800, 5802, 5804, 5806, 5807, 5809, 5811, 5813, 5818, 5820, 5821, 5822, 5823, 5825, 5826, 5827, 5828, 5830, 5831, 5836, 5837, 5839, 5842, 5843, 5845, 5846, 5847, 5848, 5850, 5852, 5855, 5856, 5858, 5861, 5864, 5866, 5867, 5870, 5871, 5872, 5873, 5875, 5876, 5877, 5878, 5879, 5880, 5881, 5884, 5886, 5888, 5889, 5890, 5891, 5892, 5893, 5898, 5899, 5900, 5903, 5905, 5907, 5910, 5913, 5916, 5921, 5924, 5929, 5931, 5936, 5937, 5938, 5942, 5943, 5944, 5945, 5950, 5953, 5957, 5960, 5963, 5966, 5969, 5975, 5976, 5981, 5984, 5988, 5990, 5991, 5994, 5998, 5999, 6001, 6007, 6014, 6015, 6016, 6021, 6023, 6024, 6026, 6028, 6031, 6032, 6034, 6037, 6038, 6040, 6043, 6046, 6048, 6053, 6054, 6056, 6058, 6060, 6062, 6066, 6068, 6074, 6076, 6079, 6083, 6084, 6085, 6089, 6090, 6093, 6096, 6098, 6100, 6106, 6110, 6111, 6114, 6118, 6121, 6127, 6130, 6133, 6135, 6137, 6138, 6141, 6143, 6145, 6148, 6150, 6151, 6152, 6153, 6154, 6156, 6159, 6160, 6162, 6163, 6166, 6167, 6168, 6169, 6170, 6171, 6172, 6175, 6177, 6180, 6183, 6187, 6188, 6190, 6193, 6194, 6195, 6196, 6198, 6201, 6202, 6204, 6207, 6211, 6212, 6214, 6215, 6216, 6218, 6219, 6220, 6222, 6225, 6226, 6230, 6235, 6239, 6241, 6242, 6243, 6244, 6245, 6247, 6250, 6252, 6254, 6259, 6260, 6261, 6264, 6265, 6268, 6270, 6273, 6275, 6278, 6280, 6282, 6286, 6287, 6288, 6291, 6293, 6298, 6299, 6300, 6302, 6303, 6305, 6307, 6308, 6312, 6313, 6314, 6315, 6316, 6317, 6318, 6320, 6321, 6323, 6325, 6327, 6328, 6334, 6335, 6337, 6340, 6341, 6344, 6348, 6350, 6353, 6354, 6357, 6360, 6362, 6364, 6368, 6372, 6374, 6377, 6378, 6383, 6386, 6392, 6394, 6398, 6400, 6404, 6405, 6409, 6410, 6411, 6417, 6418, 6424, 6426, 6429, 6431, 6432, 6433, 6435, 6436, 6437, 6438, 6440, 6442, 6445, 6446, 6448, 6449, 6452, 6455, 6457, 6458, 6461, 6462, 6463, 6464, 6465, 6470, 6473, 6475, 6478, 6480, 6481, 6484, 6485, 6486, 6489, 6491, 6492, 6494, 6498, 6502, 6504, 6505, 6507, 6511, 6513, 6514, 6086, 6088, 6091, 6094, 6097, 6099, 6101, 6103, 6105, 6108, 6112, 6115, 6116, 6117, 6119, 6120, 6122, 6123, 6125, 6126, 6128, 6131, 6132, 6134, 6136, 6139, 6142, 6144, 6146, 6149, 6155, 6157, 6161, 6164, 6173, 6174, 6176, 6178, 6181, 6182, 6184, 6186, 6189, 6191, 6192, 6197, 6199, 6200, 6205, 6206, 6208, 6210, 6213, 6221, 6223, 6224, 6227, 6229, 6231, 6232, 6233, 6234, 6236, 6237, 6238, 6240, 6246, 6248, 6251, 6253, 6255, 6256, 6257, 6258, 6262, 6266, 6269, 6271, 6272, 6274, 6276, 6277, 6281, 6283, 6284, 6285, 6289, 6292, 6294, 6295, 6296, 6297, 6301, 6304, 6306, 6309, 6310, 6311, 6319, 6322, 6324, 6326, 6329, 6330, 6331, 6333, 6336, 6338, 6342, 6345, 6347, 6349, 6351, 6355, 6356, 6358, 6359, 6361, 6365, 6367, 6369, 6371, 6373, 6375, 6376, 6379, 6381, 6382, 6384, 6387, 6388, 6389, 6390, 6393, 6395, 6397, 6399, 6401, 6402, 6403, 6406, 6407, 6412, 6413, 6414, 6415, 6416, 6419, 6420, 6421, 6422, 6423, 6425, 6427, 6428, 6434, 6441, 6443, 6444, 6447, 6450, 6451, 6453, 6459, 6460, 6466, 6467, 6468, 6469, 6471, 6472, 6474, 6476, 6479, 6482, 6487, 6490, 6493, 6496, 6497, 6499, 6500, 6501, 6503, 6506, 6508, 6510, 6512, 6515, 6518, 6521, 6522, 6523, 6524, 6528, 6532, 6535, 6539, 6549, 6560, 6561, 6564, 6566, 6567, 6570, 6573, 6576, 6577, 6578, 6579, 6583, 6584, 6585, 6586, 6587, 6590, 6591, 6594, 6596, 6597, 6603, 6605, 6608, 6609, 6610, 6611, 6612, 6615, 6625, 6630, 6632, 6633, 6634, 6638, 6639, 6642, 6643, 6644, 6647, 6650, 6655, 6657, 6658, 6659, 6661, 6663, 6664, 6665, 6669, 6671, 6674, 6677, 6678, 6679, 6680, 6681, 6682, 6686, 6687, 6688, 6689, 6690, 6691, 6693, 6695, 6696, 6697, 6699, 6701, 6703, 6704, 6705, 6706, 6707, 6708, 6710, 6711, 6712, 6713, 6717, 6718, 6720, 6721, 6722, 6725, 6727, 6732, 6734, 6735, 6739, 6741, 6745, 6748, 6751, 6755, 6759, 6762, 6764, 6767, 6770, 6772, 6773, 6774, 6777, 6778, 6782, 6785, 6786, 6787, 6790, 6791, 6794, 6795, 6796, 6798, 6800, 6802, 6803, 6806, 6811, 6814, 6815, 6818, 6824, 6829, 6834, 6835, 6842, 6516, 6519, 6525, 6526, 6527, 6529, 6531, 6533, 6536, 6537, 6538, 6540, 6541, 6542, 6543, 6544, 6545, 6546, 6547, 6548, 6550, 6551, 6552, 6553, 6554, 6556, 6558, 6562, 6563, 6565, 6568, 6571, 6572, 6575, 6580, 6582, 6588, 6589, 6592, 6595, 6598, 6599, 6600, 6601, 6602, 6604, 6606, 6607, 6613, 6614, 6617, 6618, 6619, 6620, 6621, 6623, 6624, 6627, 6628, 6629, 6631, 6635, 6640, 6641, 6645, 6646, 6649, 6651, 6652, 6653, 6656, 6660, 6662, 6666, 6668, 6670, 6672, 6675, 6676, 6683, 6685, 6692, 6694, 6698, 6700, 6702, 6709, 6714, 6715, 6716, 6719, 6723, 6726, 6728, 6730, 6731, 6736, 6738, 6740, 6742, 6744, 6746, 6747, 6749, 6752, 6754, 6756, 6757, 6758, 6760, 6761, 6765, 6769, 6775, 6779, 6781, 6783, 6784, 6789, 6792, 6797, 6799, 6801, 6804, 6805, 6807, 6809, 6810, 6812, 6816, 6817, 6819, 6821, 6822, 6825, 6827, 6828, 6830, 6831, 6832, 6833, 6836, 6837, 6838, 6839, 6840, 6841, 6843,

[0281] Detection: 6517, 6520, 6530, 6534, 6555, 6557, 6559, 6569, 6574, 6581, 6593, 6616, 6622, 6626, 6636, 6637, 6648, 6654, 6667, 6673, 6684, 6724, 6729, 6733, 6737, 6743, 6750, 6753, 6763, 6766, 6768, 6771, 6776, 6780, 6788, 6793, 6808, 6813, 6820, 6823, 6826, 6844, 6848, 6850, 6852, 6854, 6857, 6859, 6861, 6862, 6865, 6868, 6870, 6871, 6872, 6874, 6875, 6876, 6880, 6883, 6886, 6887, 6888, 6890, 6891, 6894, 6896, 6897, 6898, 6899, 6900, 6901, 6902, 6904, 6905, 6906, 6910, 6912, 6917, 6920, 6845, 6847, 6849, 6851, 6853, 6855, 6858, 6860, 6863, 6866, 6869, 6873, 6877, 6879, 6881, 6882, 6884, 6889, 6892, 6893, 6895, 6907, 6908, 6909, 6911, 6913, 6915, 6916, 6918, 6921, 6924, 6927, 6928, 6933, 6935, 6937, 6939, 6940, 6943, 6946, 6947, 6948, 6949, 6951, 6953, 6954, 6955, 6959, 6961, 6964, 6965, 6968, 6969, 6972, 6973, 6976, 6979, 6980, 6922, 6925, 6929, 6930, 6931, 6932, 6934, 6936, 6942, 6944, 6945, 6950, 6952, 6956, 6957, 6958, 6960, 6962, 6963, 6966, 6967, 6970, 6971, 6974, 6975, 6977, 6981, 6983, 6986, 6992, 6995, 6998, 7002, 7006, 7013, 7017, 7022, 7024, 7027, 7030, 7032, 7036, 7037, 7040, 7050, 7052, 7055, 7056, 7058, 7059, 7060, 7064, 7067, 7072, 7074, 7076, 7077, 7084, 7085, 7086, 7087, 7088, 7089, 7090, 7091, 7096, 7097, 7100, 7102, 7109, 7110, 7113, 7114, 7115, 7118, 7121, 7123, 7124, 7131, 7133, 7135, 7136, 7138, 7139, 7140, 7144, 7146, 7148, 7149, 7158, 7159, 7160, 7163, 7165, 7166, 7168, 7172, 7175, 7178, 7180, 7181, 7183, 7185, 7186, 7187, 7192, 7194, 7199, 7202, 7203, 7204, 7205, 7207, 7208, 7213, 7214, 7216, 7220, 7221, 7227, 7228, 7230, 7233, 7235, 7237, 7239, 7243, 7245, 7246, 7248, 7249, 7251, 7255, 7256, 7260, 7263, 7264, 7265, 7266, 7268, 7269, 7272, 7276, 7277, 7278, 7279, 7280, 7281, 7283, 7284, 7287, 7291, 7295, 7299, 7302, 7303, 7306, 7309, 7310, 7311, 7314, 7315, 7320, 7321, 7324, 7325, 7329, 7331, 7332, 7334, 7336, 7339, 7340, 7341, 7344, 7350, 7353, 7355, 7358, 7360, 7362, 7372, 7374, 7375, 7378, 7381, 7385, 7387, 7390, 7391, 7392, 7394, 7397, 7401, 7402, 7405, 7410, 7413, 7415, 7416, 7417, 7420, 6984, 6987, 6989, 6990, 6991, 6993, 6996, 6999, 7001, 7003, 7005, 7007, 7009, 7010, 7011, 7012, 7014, 7016, 7018, 7020, 7023, 7025, 7026, 7028, 7029, 7031, 7033, 7034, 7035, 7038, 7039, 7041, 7042, 7043, 7044, 7045, 7046, 7047, 7048, 7049, 7051, 7053, 7054, 7057, 7061, 7062, 7063, 7065, 7066, 7068, 7070, 7071, 7073, 7075, 7078, 7080, 7081, 7082, 7083, 7092, 7093, 7094, 7095, 7098, 7101, 7103, 7105, 7106, 7107, 7108, 7111, 7112, 7116, 7119, 7122, 7125, 7126, 7127, 7128, 7129, 7130, 7132, 7134, 7137, 7141, 7142, 7143, 7147, 7150, 7152, 7154, 7155, 7156, 7157, 7161, 7167, 7170, 7171, 7173, 7174, 7176, 7177, 7179, 7182, 7184, 7188, 7189, 7190, 7191, 7193, 7195, 7196, 7197, 7198, 7200, 7206, 7210, 7211, 7212, 7215, 7217, 7218, 7219, 7222, 7223, 7224, 7225, 7226, 7229, 7231, 7232, 7236, 7240, 7241, 7242, 7244, 7247, 7250, 7253, 7254, 7257, 7258, 7259, 7261, 7262, 7267, 7270, 7271, 7273, 7274, 7275, 7282, 7285, 7289, 7290, 7292, 7293, 7294, 7296, 7297, 7298, 7301, 7304, 7307, 7308, 7312, 7316, 7317, 7318, 7319, 7322, 7326, 7328, 7330, 7333, 7335, 7337, 7342, 7345, 7347, 7348, 7349, 7351, 7354, 7356, 7357, 7359, 7361, 7363, 7364, 7365, 7366, 7367, 7368, 7369, 7370, 7371, 7373, 7376, 7379, 7382, 7383, 7384, 7386, 7388, 7389, 7393, 7395, 7398, 7400, 7403, 7404, 7407, 7408, 7409, 7411, 7419, 7421, 7422, 7425, 7427, 7435, 7438, 7439, 7440, 7442, 7444, 7448, 7449, 7456, 7459, 7462, 7463, 7465, 7466, 7467, 7470, 7471, 7474, 7476, 7477, 7480, 7481, 7485, 7486, 7489, 7490, 7493, 7496, 7500, 7503, 7508, 7512, 7518, 7519, 7520, 7522, 7524, 7525, 7527, 7528, 7529, 7532, 7540, 7542, 7543, 7545, 7549, 7552, 7554, 7423, 7426, 7428, 7430, 7431, 7432, 7433, 7434, 7436, 7445, 7446, 7447, 7450, 7451, 7452, 7453, 7454, 7455, 7457, 7460, 7464, 7468, 7472, 7475, 7478, 7479, 7482, 7483, 7484, 7487, 7488, 7492, 7494, 7495, 7497, 7498, 7499, 7501, 7505, 7506, 7507, 7509, 7510, 7511, 7513, 7515, 7516, 7517, 7521, 7523, 7526, 7530, 7533, 7534, 7535, 7536, 7537, 7538, 7539, 7541, 7544, 7546, 7547, 7548, 7550, 7555, 7558, 7559, 7560, 7565, 7566, 7567, 7570, 7571, 7573, 7574, 7575, 7576, 7577, 7578, 7579, 7580, 7581, 7582, 7585, 7586, 7587, 7588, 7589, 7590, 7596, 7597, 7598, 7600, 7603, 7606, 7609, 7610, 7615, 7618, 7620, 7621, 7623, 7627, 7629, 7633, 7635, 7636, 7643, 7647, 7651, 7655, 7661, 7666, 7672, 7674, 7676, 7677, 7682, 7683, 7685, 7687, 7689, 7690, 7691, 7694, 7699, 7701, 7702, 7704, 7707, 7709, 7711, 7712, 7713, 7714, 7716, 7718, 7720, 7726, 7728, 7729, 7733, 7734, 7735, 7736, 7738, 7740, 7741, 7744, 7746, 7747, 7748, 7749, 7750, 7751, 7752, 7753, 7754, 7755, 7756, 7758, 7556, 7561, 7563, 7568, 7583, 7584, 7591, 7593, 7594, 7595, 7599, 7601, 7604, 7607, 7608, 7611, 7613, 7614, 7616, 7617, 7619, 7622, 7624, 7626, 7628, 7631, 7637, 7638, 7639, 7640, 7641, 7642, 7644, 7645, 7646, 7649, 7650, 7652, 7654, 7656, 7657, 7658, 7659, 7660, 7662, 7663, 7665, 7667, 7669, 7670, 7671, 7673, 7675, 7678, 7679, 7680, 7681, 7684, 7686, 7688, 7692, 7695, 7697, 7698, 7700, 7703, 7705, 7708, 7710, 7715, 7717, 7719, 7721, 7722, 7723, 7724, 7725, 7727, 7730, 7731, 7732, 7737, 7739, 7742, 7743, 7745, 7757, 7759, 7760, 7761, 7764, 7770, 7774, 7775, 7778, 7782, 7786, 7788, 7795, 7797, 7799, 7805, 7807, 7809, 7810, 7811, 7815, 7817, 7819, 7820, 7822, 7823, 7824, 7828, 7832, 7834, 7837, 7839, 7843, 7845, 7851, 7852, 7857, 7860, 7863, 7865, 7868, 7874, 7881, 7885, 7889, 7892, 7894, 7896, 7900, 7902, 7904, 7907, 7909, 7910, 7913, 7917, 7922, 7925, 7926, 7928, 7933, 7934, 7937, 7941, 7945, 7946, 7948, 7950, 7951, 7952, 7953, 7954, 7955, 7956, 7957, 7963, 7964, 7968, 7971, 7972, 7973, 7976, 7979, 7980, 7981, 7982, 7983, 7985, 7986, 7987, 7988, 7991, 7762, 7765, 7767, 7768, 7771, 7773, 7776, 7779, 7781, 7783, 7784, 7785, 7789, 7791, 7792, 7793, 7794, 7796, 7798, 7800, 7802, 7803, 7808, 7812, 7813, 7814, 7816, 7818, 7821, 7825, 7827, 7829, 7830, 7833, 7835, 7836, 7838, 7840, 7841, 7842, 7844, 7846, 7847, 7848, 7849, 7853, 7854, 7855, 7856, 7858, 7861, 7864, 7866, 7869, 7870, 7871, 7872, 7873, 7875, 7877, 7878, 7879, 7880, 7882, 7884, 7886, 7888, 7890, 7897, 7899, 7903, 7905, 7912, 7914, 7916, 7918, 7919, 7920, 7921, 7923, 7929, 7931, 7932, 7936, 7938, 7939, 7940, 7942, 7943, 7944, 7947, 7949, 7958, 7960, 7962, 7965, 7967, 7969, 7970, 7974, 7977, 7989, 7990, 7992, 7995, 7996, 8000, 8003, 8006, 8007, 8010, 8012, 8015, 8016, 8018, 8019, 8026, 8027, 8030, 8034, 8035, 8038, 8039, 8043, 8044, 8046, 8049, 8050, 8052, 8053, 8055, 8056, 8062, 8064, 8066, 8067, 8068, 8069, 8070, 8071, 8074, 8076, 8077, 8078, 8079, 8080, 8081, 7993, 7997, 7999, 8001, 8004, 8005, 8008, 8009, 8011, 8013, 8017, 8020, 8021, 8022, 8023, 8024, 8025, 8028, 8031, 8033, 8036, 8040, 8042, 8047, 8051, 8054, 8057, 8059, 8060, 8061, 8065, 8072, 8073, 8075, 8082, 8083, 8084, 8085, 8087, 8088, 8089, 8090, 8093, 8095, 8098, 8100, 8101, 8102, 8104, 8107, 8110, 8111, 8114, 8115, 8116, 8118, 8122, 8124, 8126, 8127, 8129, 8132, 8134, 8136, 8138, 8142, 8143, 8144, 8146, 8151, 8157, 8160, 8163, 8165, 8168, 8169, 8170, 8173, 8174, 8175, 8176, 8178, 8181, 8185, 8187, 8188, 8189, 8190, 8191, 8193, 8194, 8200, 8203, 8206, 8208, 8209, 8212, 8214, 8216, 8217, 8220, 8222, 8224, 8228, 8230, 8091, 8094, 8096, 8099, 8103, 8105, 8108, 8112, 8113, 8117, 8119, 8121, 8123, 8125, 8128, 8130, 8131, 8133, 8135, 8137, 8139, 8145, 8147, 8148, 8149, 8150, 8152, 8153, 8154, 8155, 8156, 8158, 8161, 8164, 8166, 8167, 8171, 8177, 8179, 8180, 8182, 8183, 8184, 8186, 8192, 8195, 8197, 8198, 8199, 8201, 8202, 8204, 8207, 8210, 8213, 8218, 8221, 8223, 8225, 8227, 8229, 8231, 8232, 8235, 8236, 8237, 8238, 8244, 8245, 8247, 8250, 8251, 8253, 8254, 8255, 8256, 8258, 8259, 8260, 8263, 8267, 8269, 8270, 8273, 8274, 8277, 8280, 8281, 8289, 8292, 8293, 8294, 8295, 8296, 8297, 8298, 8301, 8305, 8306, 8310, 8311, 8312, 8315, 8317, 8318, 8322, 8323, 8324, 8327, 8328, 8329, 8330, 8333, 8336, 8339, 8340, 8347, 8349, 8350, 8352, 8353, 8356, 8359, 8360, 8366, 8369, 8370, 8372, 8374, 8376, 8377, 8379, 8381, 8382, 8383, 8233, 8239, 8240, 8242, 8243, 8246, 8248, 8252, 8257, 8261, 8264, 8266, 8268, 8271, 8275, 8278, 8282, 8284, 8285, 8286, 8287, 8288, 8291, 8299, 8302, 8303, 8304, 8307, 8309, 8313, 8314, 8316, 8319, 8321, 8325, 8326, 8331, 8332, 8334, 8335, 8337, 8341, 8342, 8343, 8344, 8345, 8346, 8348, 8351, 8354, 8357, 8361, 8362, 8363, 8364, 8365, 8367, 8371, 8373, 8375, 8378, 8384, 8387, 8390, 8391, 8397, 8398, 8401, 8402, 8405, 8406, 8409, 8414, 8418, 8419, 8422, 8425, 8428, 8431, 8432, 8433, 8435, 8437, 8440, 8444, 8449, 8452, 8454, 8455, 8457, 8462, 8464, 8466, 8468, 8469, 8472, 8475, 8476, 8478, 8479, 8481, 8484, 8487, 8488, 8490, 8493, 8496, 8497, 8498, 8501, 8505, 8508, 8511, 8513, 8515, 8517, 8518, 8519, 8521, 8522, 8523, 8526, 8528, 8530, 8531, 8532, 8534, 8536, 8541, 8544, 8547, 8551, 8554, 8556, 8558, 8560, 8562, 8563, 8566, 8567, 8568, 8570, 8571, 8574, 8575, 8576, 8577, 8580, 8581, 8585, 8588, 8591, 8594, 8601, 8602, 8603, 8608, 8609, 8613, 8614, 8617, 8618, 8619, 8620, 8623, 8624, 8628, 8629, 8630, 8633, 8634, 8635, 8636, 8638, 8643, 8645, 8648, 8654, 8657, 8658, 8659, 8660, 8661, 8662, 8666, 8670, 8672, 8674, 8676, 8681, 8683, 8686, 8688, 8689, 8691, 8692, 8693, 8695, 8696, 8700, 8701, 8702, 8703, 8704, 8705, 8709, 8716, 8717, 8719, 8722, 8725, 8727, 8728, 8729, 8732, 8733, 8734, 8735, 8736, 8385, 8388, 8392, 8394, 8395, 8399, 8403, 8407, 8410, 8411, 8412, 8413, 8415, 8416, 8420, 8423, 8424, 8426, 8429, 8434, 8436, 8438, 8442, 8445, 8446, 8447, 8448, 8450, 8451, 8456, 8458, 8460, 8461, 8463, 8465, 8467, 8470, 8473, 8474, 8477, 8480, 8482, 8485, 8486, 8489, 8491, 8492, 8494, 8499, 8500, 8502, 8503, 8504, 8506, 8510, 8512, 8514, 8516, 8520, 8524, 8527, 8529, 8533, 8535, 8537, 8539, 8542, 8545, 8546, 8548, 8550, 8552, 8555, 8557, 8564, 8565, 8569, 8572, 8578, 8582, 8583, 8586, 8587, 8589, 8592, 8595, 8596, 8597, 8598, 8599, 8600, 8604, 8606, 8607, 8610, 8612, 8615, 8616, 8621, 8625, 8627, 8631, 8632, 8637, 8639, 8640, 8641, 8642, 8644, 8646, 8647, 8649, 8650, 8651, 8652, 8653, 8655, 8663, 8665, 8667, 8668, 8669, 8671, 8673, 8675, 8677, 8678, 8679, 8680, 8682, 8684, 8685, 8687, 8690, 8694, 8697, 8698, 8699, 8706, 8707, 8708, 8710, 8711, 8712, 8713, 8714, 8715, 8718, 8720, 8723, 8726, 8730, 8737, 8738, 8741, 8744, 8747, 8750, 8751, 8753, 8754, 8755, 8756, 8759, 8760, 8762, 8763, 8766, 8767, 8768, 8769, 8770, 8772, 8775, 8776, 8777, 8779, 8782, 8783, 8784, 8785, 8786, 8787, 8788, 8789, 8790, 8793, 8794, 8796, 8798, 8799, 8801, 8803, 8804, 8806, 8807, 8809, 8812, 8813, 8815, 8820, 8823, 8826, 8829, 8830, 8832, 8835, 8836, 8837, 8842, 8845, 8846, 8847, 8851, 8853, 8856, 8857, 8859, 8861, 8866, 8739, 8878, 8879, 8880, 8884, 8891, 8893, 8895, 8898, 8900, 8901, 8909, 8912, 8739, 8742, 8745, 8748, 8749, 8752, 8757, 8758, 8761, 8764, 8771, 8773, 8778, 8780, 8791, 8797, 8800, 8802, 8805, 8808, 8810, 8814, 8816, 8818, 8819, 8821, 8824, 8827, 8828, 8831, 8833, 8838, 8840, 8841, 8755, 8843, 8844, 8848, 8850, 8852, 8854, 8855, 8863, 8864, 8865, 8867, 8868, 8869, 8870, 8871, 8872, 8873, 8874, 8876, 8877, 8881, 8882, 8883, 8885, 8887, 8888, 8889, 8890, 8892, 8894, 8896, 8897, 8899, 8902, 8785, 8903, 8904, 8905, 8906, 8907, 8908, 8911, 8913, 8917, 8920, 8923, 8924, 8929, 8931, 8934, 8935, 8936, 8914, 8916, 8918, 8921, 8925, 8927, 8928, 8930, 8932, 8933, 8937, 8980, 8984, 8988, 8989, 8998, 9001, 9002, 9005, 9007, 9008, 9012, 9013, 9016, 9019, 9020, 9022, 9023, 9025, 9028, 9029, 9032, 9033, 9034, 9035, 9037, 9038, 9044, 9046, 9047, 9048, 9049, 9054, 8981, 8983, 8985, 8987, 8990, 8992, 8993, 8994, 8995, 8997, 8999, 9003, 9004, 9006, 9009, 9010, 9011, 9014, 9017, 9018, 9021, 9024, 9026, 9030, 9036, 9039, 9041, 9042, 9043, 9045, 9050, 9051, 9052, 9053, 9055, 9058, 9060, 9063, 9066, 9067, 9068, 9069, 9070, 9071, 9074, 9075, 9077, 9078, 9079, 9080, 9082, 9084, 9088, 9089, 9090, 9099, 9103, 9104, 9105, 9107, 9111, 9056, 9061, 9064, 9072, 9081, 9083, 9085, 9086, 9087, 9091, 9092, 9093, 9094, 9095, 9096, 9097, 9098, 9100, 9102, 9106, 9108, 9109, 9110, 9112, 9113, 9116, 9118, 9125, 9126, 9128, 9129, 9130, 9136, 9141, 9143, 9148, 9150, 9153, 9157, 9158, 9159, 9163, 9164, 9165, 9167, 9168, 9171, 9173, 9177, 9180, 9181, 9182, 9183, 9185, 9187, 9188, 9189, 9191, 9192, 9193, 9194, 9197, 9198, 9200, 9206, 9207, 9208, 9209, 9211, 9216, 9218, 9219, 9220, 9221, 9222, 9223, 9226, 9228, 9229, 9230, 9231, 9232, 9233, 9234, 9237, 9238, 9240, 9243, 9246, 9248, 9253, 9256, 9257, 9260, 9263, 9264, 9266, 9269, 9271, 9279, 9280, 9281, 9282, 9283, 9284, 9290, 9114, 9119, 9121, 9122, 9123, 9124, 9127, 9131, 9133, 9134, 9135, 9137, 9138, 9139, 9140, 9142, 9144, 9146, 9147, 9149, 9151, 9152, 9154, 9155, 9156, 9160, 9162, 9166, 9169, 9172, 9174, 9175, 9176, 9178, 9184, 9186, 9190, 9195, 9199, 9201, 9202, 9203, 9204, 9205, 9212, 9214, 9215, 9217, 9224, 9227, 9235, 9239, 9241, 9244, 9247, 9249, 9251, 9252, 9254, 9258, 9261, 9265, 9267, 9270, 9273, 9274, 9275, 9276, 9277, 9278, 9285, 9286, 9287, 9288, 9289, 9291, 9292, 9295, 9297, 9300, 9302, 9303, 9304, 9307, 9308, 9310, 9311, 9313, 9319, 9321, 9323, 9324, 9328, 9333, 9334, 9337, 9338, 9339, 9342, 9344, 9348, 9351, 9352, 9354, 9355, 9357, 9360, 9367, 9371, 9374, 9377, 9379, 9383, 9384, 9385, 9388, 9389, 9390, 9393, 9394, 9398, 9401, 9402, 9406, 9408, 9409, 9410, 9413, 9415, 9416, 9417, 9418, 9419, 9421, 9422, 9425, 9429, 9433, 9434, 9435, 9436, 9437, 9439, 9440, 9446, 9452, 9453, 9454, 9455, 9457, 9458, 9459, 9462, 9466, 9467, 9468, 9470, 9474, 9479, 9482, 9487, 9488, 9489, 9492, 9495, 9497, 9499, 9500, 9504, 9505, 9508, 9513, 9514, 9519, 9522, 9523, 9524, 9526, 9528, 9532, 9533, 9534, 9535, 9537, 9538, 9541, 9542, 9543, 9545, 9546, 9548, 9293, 9296, 9298, 9301, 9305, 9309, 9312, 9314, 9316, 9317, 9318, 9320, 9322, 9325, 9326, 9327, 9329, 9331, 9332, 9335, 9336, 9340, 9345, 9347, 9349, 9353, 9356, 9358, 9361, 9363, 9364, 9365, 9368, 9370, 9372, 9375, 9376, 9378, 9380, 9382, 9386, 9391, 9395, 9397, 9399, 9400, 9403, 9405, 9407, 9411, 9412, 9414, 9420, 9423, 9424, 9426, 9428, 9430, 9431, 9432, 9438, 9441, 9443, 9444, 9445, 9447, 9448, 9449, 9450, 9451, 9456, 9460, 9461, 9464, 9465, 9469, 9471, 9473, 9475, 9477, 9478, 9480, 9483, 9485, 9490, 9493, 9494, 9496, 9498, 9501, 9502, 9503, 9506, 9509, 9511, 9512, 9515, 9516, 9517, 9518, 9520, 9521, 9525, 9527, 9529, 9530, 9536, 9539, 9544, 9547, 9549, 9550, 9551, 9555, 9556, 9557, 9559, 9560, 9563, 9564, 9565, 9566, 9569, 9570, 9573, 9577, 9578, 9579, 9580, 9585, 9586, 9587, 9588, 9591, 9593, 9596, 9552, 9554, 9558, 9561, 9567, 9571, 9574, 9576, 9581, 9583, 9584, 9589, 9592, 9594, 9595, 9598, 9602, 9604, 9605, 9608, 9612, 9613, 9614, 9617, 9618, 9621, 9622, 9625, 9626, 9627, 9632, 9633, 9638, 9640, 9643, 9644, 9645, 9646, 9651, 9654, 9656, 9657, 9658, 9661, 9662, 9665, 9666, 9667, 9668, 9672, 9673, 9675, 9676, 9677, 9680, 9683, 9686, 9688, 9691, 9694, 9698, 9699, 9702, 9705, 9707, 9710, 9711, 9715, 9719, 9720, 9722, 9723, 9726, 9729, 9732, 9733, 9735, 9737, 9738, 9741, 9744, 9745, 9746, 9747, 9748, 9749, 9750, 9754, 9755, 9756, 9758, 9759, 9768, 9771, 9772, 9776, 9777, 9781, 9782, 9784, 9787, 9789, 9790, 9792, 9796, 9797, 9800, 9805, 9806, 9812, 9815, 9818, 9821, 9823, 9825, 9827, 9831, 9832, 9835, 9837, 9839, 9841, 9842, 9844, 9845, 9851, 9853, 9854, 9855, 9857, 9860, 9862, 9863, 9865, 9871, 9873, 9875, 9878, 9879, 9599, 9601, 9603, 9606, 9607, 9609, 9611, 9615, 9619, 9623, 9624, 9628, 9630, 9631, 9634, 9635, 9637, 9639, 9641, 9647, 9649; 9650, 9652, 9653, 9659, 9660, 9663, 9664, 9670, 9671, 9679, 9682, 9684, 9687, 9690, 9692, 9693, 9695, 9697, 9700, 9701, 9703, 9706, 9708, 9712, 9713, 9714, 9716, 9717, 9718, 9721, 9724, 9727, 9730, 9734, 9739, 9742, 9751, 9753, 9757, 9760, 9761, 9762, 9763, 9764, 9765, 9766, 9767, 9769, 9773, 9775, 9778, 9780, 9783, 9786, 9788, 9791, 9793, 9794, 9795, 9798, 9801, 9803, 9804, 9807, 9808, 9809, 9810, 9811, 9813, 9816, 9817, 9819, 9820, 9822, 9826, 9828, 9830, 9833, 9836, 9838, 9840, 9843, 9846, 9847, 9848, 9849, 9850, 9852, 9856, 9858, 9859, 9861, 9864, 9866, 9867, 9868, 9869, 9870, 9872, 9876, 9877, 9880, 9881, 9882, 9886, 9890, 9891, 9894, 9900, 9902, 9904, 9908, 9911, 9912, 9915, 9917, 9919, 9923, 9925, 9928, 9935, 9936, 9940, 9943, 9949, 9953, 9954, 9956, 9957, 9958, 9962, 9963, 9964, 9968, 9969, 9975, 9978, 9981, 9988, 9989, 9990, 9991, 9992, 9995, 9997, 10011, 10012, 10014, 10017, 10018, 10031, 10032, 10033, 10034, 10035, 10037, 10041, 10042, 10046, 10050, 10054, 10058, 10059, 9883, 9885, 9887, 9889, 9892, 9893, 9895, 9896, 9897, 9898, 9899, 9901, 9903, 9905, 9907, 9909, 9913, 9914, 9916, 9918, 9920, 9921, 9922, 9924, 9926, 9929, 9931, 9932, 9933, 9934, 9937, 9938, 9939, 9941, 9942, 9944, 9945, 9946, 9947, 9948, 9950, 9952, 9955, 9959, 9960, 9961, 9966, 9967, 9970, 9972, 9973, 9974, 9976, 9979, 9980, 9982, 9983, 9984, 9985, 9986, 9987, 9993, 9994, 9996, 9998, 9999, 10000, 10001, 10002, 10003, 10004, 10005, 10006, 10007, 10008, 10009, 10010, 10013, 10015, 10016, 10019, 10020, 10021, 10022, 10023, 10025, 10026, 10027, 10028, 10030, 10036, 10038, 10040, 10043, 10044, 10045, 10047, 10048, 10049, 10051, 10053, 10055, 10056, 10057, 10060, 10061, 10064, 10067, 10068, 10070, 10071, 10072, 10074, 10079, 10081, 10083, 10088, 10091, 10095, 10096, 10097, 10101, 10103, 10105, 10106, 10109, 10110, 10111, 10113, 10116, 10118, 10120, 10122, 10125, 10126, 10127, 10131, 10134, 10137, 10138, 10144, 10147, 10149, 10151, 10152, 10155, 10156, 10159, 10160, 10169, 10172, 10174, 10175, 10178, 10181, 10186, 10188, 10189, 10190, 10191, 10192, 10196, 10199, 10203, 10204, 10210, 10211, 10216, 10218, 10221, 10224, 10225, 10226, 10229, 10230, 10231, 10232, 10234, 10239, 10241, 10244, 10252, 10253, 10257, 10258, 10259, 10261, 10266, 10272, 10276, 10062, 10065, 10069, 10075, 10077, 10078, 10080, 10082, 10084, 10086, 10087, 10089, 10090, 10092, 10093, 10094, 10098, 10099, 10100, 10102, 10104, 10107, 10112, 10114, 10117, 10119, 10121, 10123, 10124, 10129, 10130, 10132, 10133, 10135, 10139, 10140, 10141, 10142, 10143, 10145, 10148, 10150, 10153, 10154, 10157, 10161, 10163, 10164, 10165, 10166, 10167, 10170, 10173, 10176, 10177, 10179, 10182, 10183, 10184, 10187, 10193, 10194, 10195, 10197, 10198, 10200, 10201, 10202, 10205, 10206, 10207, 10209, 10212, 10213, 10214, 10215, 10219, 10220, 10222, 10223, 10227, 10228, 10233, 10235, 10236, 10237, 10240, 10242, 10243, 10245, 10247, 10248, 10249, 10251, 10254, 10255, 10256, 10260, 10262, 10263, 10264, 10265, 10267, 10268, 10269, 10270, 10271, 10273, 10274, 10275, 10277, 10278, 10279, 10282, 10285, 10287, 10291, 10292, 10297, 10299, 10301, 10304, 10306, 10308, 10310, 10314, 10317, 10318, 10320, 10322, 10327, 10329, 10330, 10333, 10335, 10336, 10337, 10340, 10342, 10348, 10350, 10351, 10354, 10358, 10359, 10360, 10362, 10366, 10369, 10372, 10373, 10374, 10376, 10378, 10383, 10385, 10391, 10398, 10403, 10407, 10410, 10413, 10415, 10419, 10422, 10425, 10427, 10428, 10429, 10430, 10432, 10433, 10434, 10437, 10438, 10439, 10442, 10443, 10445, 10446, 10447, 10448, 10452, 10453, 10454, 10455, 10456, 10460, 10463, 10466, 10467, 10469, 10470, 10473, 10475, 10477, 10480, 10484, 10488, 10490, 10494, 10495, 10497, 10501, 10502, 10503, 10507, 10508, 10510, 10517, 10518, 10520, 10522, 10524, 10525, 10528, 10529, 10533, 10536, 10537, 10540, 10541, 10545, 10547, 10551, 10553, 10556, 10559, 10560, 10563, 10564, 10565, 10568, 10571, 10574, 10576, 10579, 10581, 10583, 10588, 10589, 10590, 10592, 10593, 10596, 10597, 10601, 10602, 10603, 10605, 10607, 10609, 10610, 10612, 10613, 10617, 10618, 10621, 10624, 10627, 10630, 10632, 10634, 10637, 10638, 10639, 10640, 10641, 10643, 10645, 10647, 10653, 10655, 10657, 10659, 10661, 10662, 10663, 10664, 10665, 10666, 10667, 10668, 10669, 10672, 10673, 10674, 10675, 10280, 10283, 10286, 10288, 10290, 10293, 10295, 10298, 10300, 10302, 10305, 10307, 10309, 10311, 10312, 10313, 10315, 10319, 10321, 10323, 10325, 10326, 10328, 10331, 10338, 10341, 10343, 10344, 10345, 10346, 10347, 10349, 10352, 10355, 10356, 10357, 10361, 10363, 10365, 10367, 10370, 10375, 10377, 10379, 10380, 10381, 10382, 10384, 10386, 10387, 10388, 10390, 10392, 10394, 10395, 10399, 10401, 10402, 10404, 10406, 10408, 10411, 10412, 10414, 10416, 10417, 10418, 10420, 10423, 10426, 10431, 10435, 10440, 10444, 10449, 10451, 10457, 10459, 10461, 10462, 10464, 10465, 10468, 10471, 10476, 10478, 10481, 10483, 10485, 10487, 10489, 10491, 10492, 10493, 10498, 10499, 10500, 10504, 10506, 10509, 10511, 10513, 10514, 10515, 10516, 10519, 10521, 10523, 10526, 10530, 10531, 10532, 10534, 10535, 10538, 10539, 10542, 10543, 10544, 10546, 10548, 10550, 10552, 10554, 10557, 10558, 10561, 10566, 10569, 10572, 10573, 10577, 10578, 10580, 10582, 10584, 10586, 10594, 10598, 10600, 10604, 10606, 10611, 10614, 10616, 10619, 10622, 10625, 10626, 10628, 10631, 10633, 10635, 10642, 10644, 10646, 10648, 10649, 10650, 10651, 10652, 10654, 10656, 10658, 10660, 10670, 10671, 10676, 10678, 10684, 10679, 10681, 10682, 10683, 10685, 10687, 10688, 10689, 10690, 10691, 10693, 10696, 10699, 10703, 10704, 10709, 10711, 10712, 10713, 10720, 10721, 10722, 10724, 10725, 10726, 10728, 10729, 10734, 10740, 10742, 10743, 10744, 10745, 10746, 10748, 10749, 10751, 10754, 10758, 10759, 10760, 10764, 10768, 10769, 10772, 10775, 10780, 10781, 10783, 10786, 10791, 10796, 10801, 10808, 10817, 10818, 10819, 10821, 10823, 10826, 10827, 10829, 10830, 10834, 10843, 10844, 10847, 10848, 10849, 10853, 10856, 10858, 10866, 10869, 10872, 10874, 10877, 10878, 10879, 10882, 10884, 10885, 10889, 10892, 10893, 10896, 10900, 10901, 10903, 10905, 10907, 10909, 10910, 10911, 10914, 10916, 10919, 10926, 10930, 10932, 10933, 10934, 10938, 10941, 10942, 10943, 10944, 10946, 10947, 10953, 10955, 10956, 10958, 10959, 10962, 10967, 10968, 10972, 10975, 10977, 10978, 10981, 10984, 10985, 10988, 10992, 10995, 10997, 10999, 11000, 11001, 11006, 11009, 11013, 11016, 11020, 11025, 11033, 11036, 11040, 11041, 11042, 11043, 11045, 11046, 11048, 11052, 11055, 11060, 11061, 11062, 11064, 11065, 11067, 11070, 11071, 11072, 11078, 11079, 11081, 11085, 11093, 10694, 10697, 10700, 10702, 10705, 10707, 10710, 10714, 10716, 10717, 10718, 10719, 10723, 10727, 10730, 10732, 10733, 10735, 10737, 10738, 10739, 10741, 10747, 10750, 10752, 10755, 10757, 10761, 10762, 10763, 10765, 10767, 10770, 10773, 10776, 10778, 10779, 10782, 10784, 10788, 10789, 10790, 10792, 10793, 10794, 10798, 10799, 10800, 10802, 10804, 10805, 10806, 10807, 10809, 10811, 10812, 10813, 10814, 10815, 10816, 10820, 10822, 10824, 10831, 10833, 10835, 10837, 10838, 10839, 10840, 10841, 10842, 10845, 10846, 10850, 10851, 10854, 10857, 10859, 10860, 10861, 10862, 10863, 10864, 10865, 10868, 10870, 10871, 10873, 10875, 10880, 10881, 10883, 10886, 10888, 10890, 10894, 10897, 10899, 10902, 10904, 10906, 10908, 10912, 10915, 10917, 10920, 10922, 10924, 10925, 10927, 10928, 10929, 10931, 10935, 10937, 10939, 10945, 10948, 10950, 10951, 10952, 10954, 10957, 10960, 10963, 10965, 10966, 10969, 10970, 10971, 10973, 10976, 10979, 10980, 10982, 10986, 10987, 10989, 10991, 10993, 10996, 10998, 11002, 11004, 11005, 11007, 11010, 11012, 11014, 11015, 11017, 11019, 11021, 11022, 11023, 11026, 11027, 11028, 11029, 11030, 11031, 11032, 11034, 11037, 11039, 11044, 11047, 11049, 11050, 11051, 11053, 11054, 11056, 11058, 11059, 11063, 11066, 11068, 11069, 11073, 11074, 11075, 11076, 11077, 11080, 11082, 11083, 11084, 11086, 11087, 11088, 11089, 11090, 11091, 11092, 11094, 11376, 11381, 11382, 11383, 11384, 11387, 11397, 11401, 11405, 11408, 11414, 11418, 11421, 11422, 11424, 11427, 11429, 11430, 11377, 11379, 11380, 11385, 11386, 11388, 11390, 11391, 11392, 11394, 11395, 11396, 11398, 11399, 11400, 11402, 11403, 11404, 11406, 11409, 11410, 11411, 11412, 11415, 11416, 11417, 11419, 11423, 11425, 11428, 11431, 11432, 11433, 11434, 11438, 11442, 11443, 11447, 11449, 11450, 11452, 11456, 11459, 11463, 11464, 11467, 11468, 11472, 11477, 11480, 11481, 11482, 11483, 11484, 11488, 11489, 11493, 11498, 11502, 11504, 11505, 11506, 11507, 11508, 11509, 11512, 11513, 11514, 11517, 11520, 11522, 11523, 11524, 11526, 11528, 11532, 11534, 11435, 11439, 11444, 11445, 11446, 11448, 11451, 11453, 11457, 11458, 11460, 11461, 11462, 11465, 11466, 11469, 11473, 11474, 11475, 11476, 11478, 11479, 11485, 11486, 11487, 11490, 11494, 11497, 11499, 11500, 11501, 11503, 11510, 11511, 11515, 11518, 11519, 11521, 11525, 11527, 11529, 11535, 11539, 11540, 11541, 11548, 11550, 11551, 11552, 11555, 11556, 11557, 11560, 11561, 11562, 11568, 11569, 11571, 11572, 11573, 11577, 11536, 11542, 11545, 11546, 11547, 11549, 11553, 11554, 11563, 11566, 11570, 11574, 11578, 11585, 11586, 11590, 11591, 11592, 11595, 11596, 11597, 11600, 11579, 11582, 11587, 11593, 11594, 11598, 11601, 11602, 11606, 11607, 11608, 11609, 11616, 11618, 11622, 11626, 11628, 11632, 11633, 11603, 11610, 11613, 11614, 11615, 11617, 11619, 11623, 11627, 11629, 11634, 11635, 11640, 11641, 11642, 11643, 11647, 11648, 11654, 11655, 11656, 11657, 11658, 11636, 11639, 11644, 11645, 11646, 11649, 11652, 11653, 11659, 11663, 11664, 11665, 11666, 11670, 11671, 11672, 11673, 11677, 11681, 11687, 11690, 11694, 11696, 11697, 11701, 11705, 11709, 11713, 11719, 11723, 11729, 11733, 11739, 11744, 11745, 11748, 11749, 11751, 11755, 11759, 11763, 11770, 11772, 11774, 11776, 11778, 11782, 11785, 11660, 11667, 11674, 11675, 11676, 11678, 11682, 11685, 11686, 11688, 11689, 11691, 11692, 11693, 11695, 11698, 11699, 11700, 11702, 11706, 11710, 11716, 11720, 11724, 11725, 11727, 11728, 11730, 11731, 11732, 11734, 11735, 11736, 11737, 11738, 11740, 11743, 11746, 11747, 11750, 11752, 11756, 11761, 11762, 11764, 11765, 11767, 11768, 11769, 11773, 11775, 11777, 11779, 11783, 11784, 11786, 11790, 11791, 11792, 11787, 11793, 11796, 11800, 11802, 11803, 11805, 11810, 11818, 11819, 11823, 11824, 11827, 11828, 11829, 11833, 11836, 11837, 11839, 11840, 11847, 11850, 11852, 11857, 11860, 11864, 11866, 11797, 11801, 11804, 11806, 11809, 11811, 11814, 11815, 11817, 11820, 11825, 11830, 11835, 11841, 11844, 11845, 11846, 11848, 11851, 11853, 11856, 11858, 11861, 11862, 11863, 11865, 11867, 11871, 11876, 11878, 11882, 11888, 11891, 11894, 11868, 11872, 11875, 11877, 11879, 11883, 11886, 11887, 11889, 11890, 11892, 11893, 11895, 11898, 11902, 11903, 11904, 11908, 11909, 11911, 11912, 11913, 11914, 11915, 11917, 11918, 11922, 11926, 11927, 11930, 11932, 11933, 11937, 11941, 11942, 11946, 11947, 11948, 11949, 11950, 11951, 11952, 11955, 11959, 11968, 11972, 11976, 11978, 11979, 11980, 11981, 11986, 11988, 11989, 11991, 11992, 11995, 11997, 11998, 12001, 12002, 12004, 12005, 11899, 11905, 11910, 11916, 11919, 11923, 11924, 11925, 11928, 11929, 11931, 11934, 11938, 11943, 11953, 11954, 11956, 11960, 11963, 11964, 11967, 11969, 11973, 11977, 11982, 11985, 11987, 11990, 11993, 11994, 11996, 11999, 12000, 12003, 12006, 12011, 12015, 12016, 12017, 12021, 12022, 12023, 12024, 12025, 12026, 12027, 12031, 12034, 12042, 12043, 12045, 12049, 12050, 12051, 12054, 12062, 12063, 12064, 12066, 12067, 12068, 12070, 12072, 12076, 12082, 12085, 12086, 12089, 12090, 12093, 12094, 12095, 12096, 12097, 12098, 12101, 12103, 12107, 12108, 12111, 12112, 12114, 12118, 12119, 12120, 12128, 12007, 12010, 12012, 12020, 12028, 12032, 12033, 12035, 12038, 12039, 12044, 12046, 12052, 12055, 12056, 12057, 12058, 12059, 12060, 12061, 12065, 12069, 12071, 12073, 12077, 12080, 12081, 12084, 12087, 12088, 12091, 12099, 12100, 12102, 12104, 12109, 12110, 12113, 12115, 12121, 12122, 12123, 12124, 12125, 12127, 12129, 12130, 12135, 12136, 12141, 12144, 12147, 12148, 12149, 12153, 12159, 12160, 12131, 12134, 12137, 12138, 12139, 12140, 12142, 12143, 12145, 12146, 12150, 12154, 12157, 12158, 12161, 12162, 12163, 12164, 12168, 12171, 12176, 12181, 12187, 12190, 12194, 12196, 12197, 12199, 12201, 12202, 12209, 12213, 12216, 12220, 12221, 12223, 12225, 12226, 12231, 12233, 12239, 12243, 12244, 12250, 12254, 12256, 12257, 12259, 12266, 12270, 12271, 12272, 12274, 12276, 12277, 12278, 12280, 12284, 12285, 12288, 12289, 12290, 12291, 12295, 12296, 12302, 12308, 12313, 12317, 12321, 12322, 12323, 12324, 12325, 12327, 12328, 12330, 12331, 12332, 12336, 12337, 12339, 12343, 12346, 12349, 12353, 12354, 12355, 12359, 12361, 12363, 12367, 12369, 12370, 12372, 12376, 12377, 12379, 12380, 12381, 12382, 12383, 12385, 12389, 12393, 12398, 12400, 12402, 12403, 12406, 12408, 12409, 12410, 12412, 12415, 12417, 12419, 12422, 12424, 12429, 12430, 12432, 12433, 12435, 12436, 12437, 12441, 12445, 12448, 12449, 12454, 12458, 12459, 12460, 12165, 12169, 12170, 12172, 12175, 12177, 12180, 12182, 12185, 12186, 12188, 12191, 12195, 12198, 12200, 12203, 12206, 12207, 12208, 12210, 12214, 12217, 12222, 12224, 12227, 12228, 12229, 12230, 12232, 12234, 12237, 12238, 12240, 12241, 12242, 12245, 12248, 12249, 12251, 12255, 12258, 12260, 12262, 12263, 12264, 12265, 12267, 12268, 12269, 12273, 12279, 12281, 12286, 12287, 12292, 12297, 12300, 12303, 12306, 12307, 12309, 12312, 12314, 12318, 12326, 12333, 12338, 12340, 12341, 12342, 12345, 12347, 12348, 12352, 12356, 12360, 12362, 12364, 12371, 12373, 12378, 12386, 12390, 12394, 12397, 12401, 12404, 12405, 12411, 12413, 12418, 12420, 12423, 12425, 12428, 12438, 12439, 12440, 12442, 12443, 12446, 12450, 12453, 12455, 12461, 12465, 12467, 12468, 12472, 12474, 12477, 12480, 12484, 12486, 12488, 12489, 12490, 12493, 12495, 12499, 12501, 12504, 12506, 12462, 12469, 12475, 12478, 12481, 12483, 12485, 12487, 12492, 12494, 12496, 12497, 12498, 12500, 12502, 12505, 12507, 12511, 12517, 12520, 12522, 12523, 12524, 12528, 12530, 12534, 12535, 12536, 12537, 12541, 12542, 12547, 12550, 12551, 12552, 12554, 12555, 12560, 12564, 12565, 12569, 12571, 12574, 12579, 12581, 12586, 12590, 12592, 12593, 12594, 12596, 12600, 12601, 12602, 12604, 12610, 12613, 12614, 12615, 12616, 12620, 12626, 12630, 12508, 12512, 12515, 12518, 12521, 12525, 12529, 12531, 12538, 12543, 12546, 12548, 12549, 12553, 12556, 12559, 12561, 12566, 12570, 12572, 12573, 12575, 12578, 12582, 12585, 12587, 12595, 12597, 12599, 12603, 12605, 12608, 12609, 12611, 12617, 12618, 12621, 12624, 12625, 12627, 12631, 12636, 12637, 12638, 12639, 12643, 12647, 12648, 12652, 12654, 12660, 12664, 12666, 12670, 12672, 12675, 12677, 12680, 12686, 12691, 12692, 12695, 12699, 12700, 12701, 12703, 12705, 12709, 12710, 12714, 12715, 12716, 12718, 12719, 12720, 12724, 12725, 12728, 12732, 12738, 12739, 12743, 12744, 12745, 12747, 12748, 12752, 12757, 12763, 12764, 12766, 12767, 12768, 12771, 12776, 12777, 12781, 12785, 12787, 12788, 12791, 12792, 12796, 12797, 12800, 12804, 12808, 12813, 12815, 12816, 12817, 12822, 12825, 12828, 12831, 12833, 12834, 12837, 12839, 12841, 12842, 12632, 12635, 12640, 12641, 12644, 12649, 12653, 12655, 12658, 12661, 12662, 12663, 12665, 12667, 12671, 12673, 12678, 12679, 12681, 12682, 12683, 12684, 12685, 12687, 12688, 12689, 12690, 12693, 12694, 12696, 12702, 12704, 12706, 12712, 12713, 12717, 12721, 12726, 12729, 12730, 12731, 12733, 12736, 12737, 12740, 12746, 12749, 12750, 12751, 12753, 12754, 12755, 12756, 12758, 12760, 12761, 12762, 12765, 12769, 12770, 12772, 12775, 12778, 12782, 12786, 12789, 12790, 12793, 12794, 12795, 12798, 12799, 12801, 12805, 12809, 12812, 12814, 12818, 12821, 12823, 12824, 12826, 12827, 12832, 12835, 12836, 12838, 12840, 12843, 12844, 12845, 12849, 12850, 12854, 12857, 12862, 12866, 12867, 12868, 12870, 12872, 12880, 12881, 12884, 12885, 12889, 12890, 12892, 12896, 12898, 12899, 12903, 12907, 12910, 12913, 12919, 12920, 12921, 12923, 12928, 12932, 12938, 12942, 12945, 12948, 12950, 12951, 12953, 12959, 12846, 12851, 12855, 12858, 12861, 12863, 12869, 12871, 12873, 12876, 12877, 12878, 12879, 12882, 12883, 12886, 12887, 12888, 12891, 12893, 12894, 12895, 12900, 12901, 12902, 12904, 12908, 12909, 12911, 12912, 12914, 12917, 12918, 12924, 12927, 12929, 12933, 12936, 12937, 12939, 12943, 12949, 12954, 12957, 12958, 12960, 12961, 12965, 12969, 12975, 12977, 12962, 12966, 12967, 12968, 12970, 12971, 12972, 12973, 12974, 12976, 12978, 12981, 12982, 12986, 12989, 12991, 12992, 12993, 12995, 12999, 13001, 12983, 12987, 12996, 12997, 12998, 13000, 13002, 13005, 13009, 13013, 13017, 13019, 13025, 13029, 13030, 13032, 13033, 13034, 13037, 13040, 13042, 13043, 13044, 13048, 13049, 13051, 13052, 13053, 13057, 13062, 13064, 13065, 13066, 13067, 13072, 13073, 13076, 13078, 13082, 13083, 13085, 13087, 13088, 13089, 13092, 13096, 13100, 13101, 13102, 13105, 13108, 13109, 13110, 13114, 13117, 13118, 13124, 13129, 13131, 13132, 13138, 13144, 13146, 13147, 13148, 13152, 13156, 13159, 13164, 13167, 13168, 13170, 13171, 13172, 13173, 13174, 13184, 13185, 13006, 13010, 13014, 13018, 13020, 13021, 13022, 13023, 13024, 13026, 13031, 13035, 13036, 13038, 13039, 13041, 13045, 13050, 13054, 13058, 13061, 13063, 13068, 13069, 13070, 13071, 13074, 13075, 13077, 13079, 13084, 13086, 13090, 13091, 13093, 13097, 13104, 13107, 13111, 13115, 13119, 13121, 13122, 13123, 13125, 13126, 13127, 13128, 13130, 13133, 13137, 13139, 13142, 13143, 13145, 13.149, 13153, 13157, 13158, 13160, 13163, 13165, 13166, 13169, 13175, 13176, 13177, 13178, 13179, 13180, 13181, 13182, 13183, 13186, 13189, 13190, 13191, 13195, 13196, 13197, 13199, 13200, 13204, 13206, 13192, 13198, 13201, 13207, 13212, 13213, 13226, 13228, 13231, 13235, 13240, 13245, 13247, 13248, 13250, 13254, 13256, 13258, 13264, 13265, 13268, 13269, 13273, 13274, 13277, 13279, 13280, 13281, 13286, 13208, 13211, 13214, 13217, 13220, 13222, 13224, 13225, 13227, 13229, 13232, 13233, 13234, 13237, 13239, 13241, 13242, 13244, 13246, 13249, 13251, 13255, 13257, 13259, 13262, 13263, 13266, 13267, 13270, 13275, 13276, 13282, 13285, 13641, 13645, 13646, 13649, 13650, 13652, 13653, 13654, 13655, 13658, 13659, 13642, 13647, 13648, 13656, 13660, 13661, 13664, 13669, 13670, 13671, 13672, 13673, 13675, 13676, 13677, 13681, 13683, 13685, 13687, 13689, 13691, 13693, 13696, 13665, 13668, 13674, 13678, 13682, 13684, 13686, 13688, 13690, 13692, 13694, 13695, 13697, 13701, 13702, 13703, 13709, 13713, 13714, 13715, 13719, 13721, 13722, 13726, 13728, 13732, 13735, 13740, 13698, 13704, 13705, 13706, 13707, 13708, 13710, 13716, 13717, 13718, 13720, 13723, 13724, 13725, 13727, 13729, 13733, 13734, 13736, 13739, 13741, 13744, 13745, 13749, 13751, 13752, 13753, 13754, 13758, 13762, 13765, 13766, 13768, 13772, 13773, 13774, 13777, 13778, 13779, 13783, 13785, 13790, 13791, 13797, 13802, 13803, 13805, 13806, 13807, 13809, 13812, 13814, 13816, 13817, 13818, 13819, 13820, 13823, 13824, 13826, 13828, 13746, 13755, 13759, 13763, 13764, 13767, 13769, 13775, 13776, 13780, 13784, 13786, 13788, 13789, 13792, 13795, 13796, 13798, 13800, 13804, 13808, 13813, 13815, 13821, 13822, 13829, 13832, 13837, 13841, 13844, 13845, 13846, 13849, 13854, 13855, 13856, 13857, 13861, 13865, 13869, 13871, 13875, 13879, 13880, 13833, 13836, 13838, 13843, 13847, 13850, 13853, 13858, 13862, 13866, 13870, 13872, 13876, 13881, 13882, 13883, 13889, 13894, 13902, 13903, 13910, 13911, 13914, 13915, 13916, 13928, 13929, 13930, 13931, 13935, 13936, 13937, 13944, 13947, 13948, 13950, 13960, 13961, 13962, 13964, 13965, 13966, 13968, 13970, 13971, 13972, 13976, 13978, 13884, 13887, 13890, 13893, 13895, 13898, 13900, 13904, 13905, 13906, 13907, 13908, 13909, 13912, 13913, 13917, 13920, 13921, 13922, 13923, 13924, 13925, 13926, 13932, 13938, 13941, 13942, 13943, 13945, 13946, 13949, 13953, 13954, 13956, 13957, 13958, 13959, 13963, 13967, 13969; 13974, 13975, 13977, 13980, 13981, 13988, 13989, 13990, 13992, 13994, 13995, 13999, 13982, 13985, 13986, 13987, 13991, 13993, 13996, 14000, 14001, 14002, 14003, 14004, 14009, 14014, 14017, 14020, 14024, 14026, 14029, 14035, 14036, 14040, 14043, 14045, 14051, 14057, 14058, 14059, 14063, 14065, 14066, 14067, 14068, 14069, 14070, 14071, 14073, 14074, 14078, 14079, 14080, 14081, 14082, 14083, 14084, 14085, 14087, 14094, 14095, 14100, 14108, 14109, 14113, 14114, 14118, 14120, 14121, 14122, 14130, 14133, 14138, 14141, 14142, 14143, 14147, 14005, 14008, 14010, 14013, 14015, 14018, 14021, 14025, 14027, 14028, 14030, 14033, 14034, 14037, 14038, 14039, 14041, 14042, 14044, 14046, 14049, 14050, 14052, 14055, 14056, 14060, 14064, 14072, 14077, 14086, 14088, 14089, 14090, 14091, 14092, 14093, 14096, 14097, 14098, 14099, 14101, 14102, 14103, 14104, 14105, 14106, 14107, 14110, 14115, 14123, 14126, 14127, 14132, 14134, 14135, 14136, 14137, 14139, 14140, 14144, 14145, 14148, 14151, 14155, 14157, 14161, 14166, 14171, 14175, 14183, 14187, 14190, 14192, 14194, 14195, 14196, 14200, 14201, 14152, 14156, 14158, 14162, 14165, 14167, 14170, 14172, 14176, 14179, 14180, 14182, 14184, 14185, 14186, 14188, 14189, 14191, 14193, 14197, 14198, 14199, 14202, 14203, 14204, 14210, 14211, 14216, 14217, 14223, 14226, 14228, 14229, 14230, 14233, 14235, 14239, 14241, 14243, 14244, 14250, 14254, 14255, 14256, 14257, 14260, 14261, 14262, 14267, 14268, 14269, 14273, 14274, 14277, 14281, 14284, 14286, 14289, 14292, 14293, 14297, 14299, 14301, 14304, 14305, 14306, 14312, 14316, 14320, 14322, 14324, 14328, 14329, 14331, 14337, 14342, 14344, 14346, 14347, 14349, 14350, 14353, 14356, 14361, 14363, 14364, 14365, 14366, 14205, 14208, 14212, 14215, 14218, 14221, 14224, 14225, 14227, 14231, 14236, 14240, 14242, 14245, 14246, 14247, 14251, 14263, 14266, 14270, 14278, 14282, 14283, 14285, 14287, 14290, 14291, 14294, 14298, 14300, 14302, 14303, 14307, 14310, 14313, 14317, 14323, 14325, 14327, 14330, 14334, 14338, 14340, 14341, 14345, 14348, 14351, 14352, 14354, 14355, 14357, 14358, 14359, 14360, 14367, 14368, 14372, 14373, 14375, 14386, 14369, 14374, 14376, 14379, 14380, 14381, 14382, 14383, 14384, and SEQ ID NO:14385.

[0282] Step e) of the method, namely the detection of the specific amplificates indicative of the methylation status of one or more CpG positions according to SEQ ID NOS:1 to SEQ ID NO:64 is carried out by means of real-time detection methods as described above, and wherein the sequence of said hybridization probes is selected from the group consisting of SEQ ID NOS:2753, 2756, 2758, 2761, 2766, 2770, 2774, 2778, 2799, 2807, 2813, 2819, 2822, 2826, 2848, 2857, 2900, 2906, 2908, 2910, 2913, 2921, 2925, 2940, 2943, 2952, 2964, 2983, 2986, 3009, 3012, 3015, 3024, 3030, 3035, 3046, 3058, 3062, 3067, 3070, 3074, 3077, 3079, 3082, 3087, 3095, 3099, 3102, 3106, 3112, 3120, 3125, 3129, 3132, 3141, 3143, 3154, 3156, 3158, 3161, 3177, 3188, 3191, 3193, 3200, 3208, 3211, 3220, 3231, 3241, 3251, 3254, 3258, 3263, 3272, 3277, 3288, 3294, 3296, 3299, 3303, 3317, 3323, 3326, 3329, 3336, 3341, 3362, 3366, 3370, 3375, 3379, 3382, 3387, 3394, 3398, 3405, 3407, 3410, 3412, 3416, 3422, 3425, 3430, 3449, 3451, 3457, 3460, 3465, 3468, 3486, 3498, 3502, 3507, 3523, 3532, 3539, 3546, 3550, 3567, 3572, 3579, 3582, 3610, 3620, 3628, 3648, 3659, 3664, 3672, 3675, 3680, 3682, 3685, 3687, 3699, 3712, 3716, 3720, 3734, 3751, 3763, 3766, 3769, 3783, 3789, 3795, 3811, 3816, 3825, 3830, 3835, 3841, 3843, 3846, 3849, 3855, 3859, 3879, 3882, 3910, 3912, 3913, 3918, 3925, 3929, 3932, 3946, 3953, 3956, 3967, 3969, 3973, 3977, 3989, 3992, 3996, 3999, 4002, 4008, 4014, 4026, 4030, 4036, 4041, 4044, 4053, 4057, 4060, 4062, 4081, 4091, 4097, 4103, 4107, 4118, 4126, 4140, 4143, 4147, 4155, 4158, 4164, 4175, 4178, 4183, 4187, 4193, 4200, 4203, 4210, 4212, 4215, 4222, 4227, 4230, 4235, 4240, 4250, 4253, 4264, 4278, 4294, 4312, 4314, 4320, 4329, 4339, 4346, 4356, 4363, 4380, 4402, 4404, 4414, 4419, 4421, 4431, 4439, 4445, 4449, 4459, 4468, 4483, 4493, 4500, 4513, 4526, 4527, 4532, 4544, 4550, 4552, 4566, 4577, 4591, 4594, 4604, 4608, 4623, 4625, 4629, 4637, 4651, 4654, 4657, 4673, 4679, 4682, 4692, 4698, 4710, 4712, 4713, 4723, 4725, 4729, 4734, 4740, 4743, 4747, 4752, 4757, 4762, 4765, 4775, 4781, 4796, 4799, 4803, 4809, 4826, 4831, 4863, 4866, 4880, 4888, 4914, 4916, 4931, 4933, 4939, 4955, 4959, 4962, 4965, 4994, 5001, 5008, 5012, 5023, 5029, 5035, 5046, 5059, 5063, 5068, 5071, 5079, 5082, 5085, 5089, 5092, 5095, 5098, 5102, 5108, 5113, 5118, 5122, 5127, 5130, 5133, 5138, 5141, 5146, 5152, 5154, 5178, 5192, 5197, 5206, 5213, 5228, 5236, 5243, 5258, 5267, 5275, 5277, 5283, 5294, 5298, 5302, 5305, 5320, 5325, 5328, 5335, 5345, 5350, 5357, 5374, 5381, 5384, 5386, 5390, 5397, 5402, 5406, 5411, 5423, 5430, 5439, 5453, 5463, 5473, 5476, 5479, 5483, 5489, 5514, 5520, 5523, 5530, 5547, 5584, 5590, 5607, 5610, 5613, 5617, 5621, 5631, 5636, 5641, 5653, 5655, 5658, 5666, 5669, 5675, 5685, 5692, 5695, 5703, 5706, 5716, 5719, 5726, 5738, 5746, 5749, 5752, 5755, 5757, 5761, 5765, 5772, 5784, 5799, 5805, 5815, 5819, 5829, 5851, 5869, 5901, 5908, 5911, 5914, 5917, 5925, 5941, 5951, 5967, 5974, 5979, 5982, 5985, 5989, 5995, 6022, 6029, 6044, 6047, 6052, 6057, 6061, 6069, 6071, 6080, 6082, 6087, 6092, 6095, 6102, 6104, 6107, 6109, 6113, 6124, 6129, 6140, 6147, 6158, 6165, 6179, 6185, 6203, 6209, 6217, 6228, 6249, 6263, 6267, 6279, 6290, 6332, 6339, 6343, 6346, 6352, 6363, 6366, 6370, 6380, 6385, 6391, 6396, 6408, 6430, 6439, 6454, 6456, 6477, 6483, 6488, 6495, 6509, 6517, 6520, 6530, 6534, 6555, 6557, 6559, 6569, 6574, 6581, 6593, 6616, 6622, 6626, 6636, 6637, 6648, 6654, 6667, 6673, 6684, 6724, 6729, 6733, 6737, 6743, 6750, 6753, 6763, 6766, 6768, 6771, 6776, 6780, 6788, 6793, 6808, 6813, 6820, 6823, 6826, 6846, 6856, 6864, 6867, 6878, 6885, 6903, 6914, 6919, 6923, 6926, 6938, 6941, 6978, 6982, 6985, 6988, 6994, 6997, 7000, 7004, 7008, 7015, 7019, 7021, 7069, 7079, 7099, 7104, 7117, 7120, 7145, 7151, 7153, 7162, 7164, 7169, 7201, 7209, 7234, 7238, 7252, 7286, 7288, 7300, 7305, 7313, 7323, 7327, 7338, 7343, 7346, 7352, 7377, 7380, 7396, 7399, 7406, 7412, 7414, 7418, 7424, 7429, 7437, 7441, 7443, 7458, 7461, 7469, 7473, 7491, 7502, 7504, 7514, 7531, 7551, 7553, 7557, 7562, 7564, 7569, 7572, 7592, 7602, 7605, 7612, 7625, 7630, 7632, 7634, 7648, 7653, 7664, 7668, 7693, 7696, 7706, 7763, 7766, 7769, 7772, 7777, 7780, 7787, 7790, 7801, 7804, 7806, 7826, 7831, 7850, 7859, 7862, 7867, 7876, 7883, 7887, 7891, 7893, 7895, 7898, 7901, 7906, 7908, 7911, 7915, 7924, 7927, 7930, 7935, 7959, 7961, 7966, 7975, 7978, 7984, 7994, 7998, 8002, 8014, 8029, 8032, 8037, 8041, 8045, 8048, 8058, 8063, 8086, 8092, 8097, 8106, 8109, 8120, 8140, 8141, 8159, 8162, 8172, 8196, 8205, 8211, 8215, 8219, 8226, 8234, 8241, 8249, 8262, 8265, 8272, 8276, 8279, 8283, 8290, 8300, 8308, 8320, 8338, 8355, 8358, 8368, 8380, 8386, 8389, 8393, 8396, 8400, 8404, 8408, 8417, 8421, 8427, 8430, 8439, 8441, 8443, 8453, 8459, 8471, 8483, 8495, 8507, 8509, 8525, 8538, 8540, 8543, 8549, 8553, 8559, 8561, 8573, 8579, 8584, 8590, 8593, 8605, 8611, 8622, 8626, 8656, 8664, 8721, 8724, 8731, 8740, 8743, 8746, 8765, 8774, 8781, 8792, 8795, 8811, 8817, 8822, 8825, 8834, 8839, 8849, 8858, 8860, 8862, 8875, 8886, 8910, 8915, 8919, 8922, 8926, 8940, 8947, 8956, 8959, 8973, 8982, 8986, 8991, 8996, 9000, 9015, 9027, 9031, 9040, 9057, 9059, 9062, 9065, 9073, 9076, 9101, 9115, 9117, 9120, 9132, 9145, 9161, 9170, 9179, 9196, 9210, 9213, 9225, 9236, 9242, 9245, 9250, 9255, 9259, 9262, 9268, 9272, 9294, 9299, 9306, 9315, 9330, 9341, 9343, 9346, 9350, 9359, 9362, 9366, 9369, 9373, 9381, 9387, 9392, 9396, 9404, 9427, 9442, 9463, 9472, 9476, 9481, 9484, 9486, 9491, 9507, 9510, 9531, 9540, 9553, 9562, 9568, 9572, 9575, 9582, 9590, 9597, 9600, 9610, 9616, 9620, 9629, 9636, 9642, 9648, 9655, 9669, 9674, 9678, 9681, 9685, 9689, 9696, 9704, 9709, 9725, 9728, 9731, 9736, 9740, 9743, 9752, 9770, 9774, 9779, 9785, 9799, 9802, 9814, 9824, 9829, 9834, 9874, 9884, 9888, 9906, 9910, 9927, 9930, 9951, 9965, 9971, 9977, 10024, 10029, 10039, 10052, 10063, 10066, 10073, 10076, 10085, 10108, 10115, 10128, 10136, 10146, 10158, 10162, 10168, 10171, 10180, 10185, 10208, 10217, 10238, 10246, 10250, 10281, 10284, 10289, 10294, 10296, 10303, 10316, 10324, 10332, 10334, 10339, 10353, 10364, 10368, 10371, 10389, 10393, 10396, 10397, 10400, 10405, 10409, 10421, 10424, 10436, 10441, 10450, 10458, 10472, 10474, 10479, 10482, 10486, 10496, 10505, 10512, 10527, 10549, 10555, 10562, 10567, 10570, 10575, 10585, 10587, 10591, 10595, 10599, 10608, 10615, 10620, 10623, 10629, 10636, 10677, 10680, 10686, 10692, 10695, 10698, 10701, 10706, 10708, 10715, 10731, 10736, 10753, 10756, 10766, 10771, 10774, 10777, 10785, 10787, 10795, 10797, 10803, 10810, 10825, 10828, 10832, 10836, 10852, 10855, 10867, 10876, 10887, 10891, 10895, 10898, 10913, 10918, 10921, 10923, 10936, 10940, 10949, 10961, 10964, 10974, 10983, 10990, 10994, 11003, 11008, 11011, 11018, 11024, 11035, 11038, 11057, 11095, 11378, 11389, 11393, 11407, 11413, 11420, 11426, 11436, 11440, 11454, 11470, 11491, 11495, 11530, 11437, 11441, 11455, 11471, 11492, 11496, 11516, 11531, 11533, 11537, 11543, 11558, 11564, 11575, 11538, 11544, 11559, 11565, 11567, 11576, 11580, 11583, 11588, 11581, 11584, 11589, 11599, 11634, 11604, 11611, 11620, 11624, 11630, 11605, 11612, 11621, 11625, 11631, 11637, 11650, 11638, 11651, 11661, 11668, 11679, 11683, 11703, 11707, 11711, 11714, 11717, 11721, 11726, 11741, 11753, 11757, 11766, 11771, 11780, 11662, 11669, 11680, 11684, 11704, 11708, 11712, 11715, 11718, 11722, 11742, 11754, 11758, 11760, 11781, 11788, 11794, 11789, 11795, 11798, 11807, 11812, 11816, 11821, 11831, 11842, 11854, 11799, 11808, 11813, 11822, 11826, 11832, 11834, 11838, 11843, 11849, 11855, 11859, 11869, 11873, 11880, 11884, 11896, 11870, 11874, 11881, 11885, 11897, 11900, 11906, 11920, 11935, 11939, 11944, 11957, 11961, 11965, 11970, 11974, 11983, 11901, 11907, 11921, 11936, 11940, 11945, 11958, 11962, 11966, 11971, 11975, 11984, 12008, 12013, 12018, 12029, 12036, 12040, 12047, 12074, 12078, 12083, 12105, 12116, 12009, 12014, 12019, 12030, 12037, 12041, 12048, 12053, 12075, 12079, 12036, 12092, 12106, 12117, 12126, 12132, 12151, 12155, 12133, 12152, 12156, 12166, 12173, 12178, 12183, 12189, 12192, 12204, 12211, 12218, 12235, 12246, 12252, 12282, 12293, 12298, 12301, 12304, 12310, 12315, 12319, 12334, 12350, 12357, 12365, 12374, 12387, 12391, 12395, 12416, 12426, 12444, 12451, 12456, 12167, 12174, 12179, 12184, 12193, 12205, 12212, 12215, 12219, 12236, 12247, 12253, 12261, 12275, 12283, 12294, 12299, 12305, 12311, 12316, 12320, 12329, 12335, 12344, 12351, 12358, 12366, 12368, 12375, 12384, 12388, 12392, 12396, 12399, 12407, 12414, 12421, 12427, 12431, 12434, 12447, 12452, 12457, 12463, 12470, 12473, 12482, 12464, 12466, 12471, 12476, 12479, 12491, 12503, 12509, 12513, 12516, 12514, 12532, 12539, 12544, 12557, 12562, 12567, 12576, 12583, 12588, 12591, 12606, 12612, 12622, 12628, 12510, 12514, 12519, 12526, 12527, 12533, 12540, 12545, 12558, 12563, 12568, 12577, 12580, 12584, 12589, 12598, 12607, 12619, 12623, 12629, 12633, 12642, 12645, 12650, 12656, 12668, 12674, 12676, 12697, 12707, 12722, 12734, 12741, 12759, 12773, 12779, 12783, 12802, 12806, 12810, 12819, 12829, 12634, 12646, 12651, 12657, 12659, 12669, 12698, 12708, 12711, 12723, 12707, 12727, 12735, 12742, 12774, 12780, 12784, 12803, 12807, 12811, 12820, 12830, 12847, 12852, 12859, 12864, 12874, 12905, 12915, 12925, 12930, 12934, 12940, 12944, 12946, 12955, 12848, 12853, 12856, 12860, 12865, 12875, 12897, 12906, 12916, 12922, 12926, 12931, 12935, 12941, 12930, 12947, 12952, 12956, 12963, 12979, 12964, 12980, 12984, 13003, 12985, 12988, 12990, 12994, 13004, 13007, 13011, 13015, 13027, 13046, 13055, 13059, 13080, 13094, 13098, 13112, 13120, 13134, 13140, 13150, 13154, 13161, 13187, 13008, 13012, 13016, 13028, 13047, 13056, 13060, 13081, 13095, 13099, 13103, 13106, 13113, 13116, 13135, 13136, 13141, 13151, 13155, 13162, 13188, 13193, 13202, 13194, 13203, 13205, 13209, 13215, 13218, 13236, 13252, 13260, 13271, 13283, 13210, 13216, 13219, 13221, 13223, 13230, 13238, 13243, 13253, 13261, 13272, 13278, 13284, 13643, 13644, 13651, 13657, 13662, 13663, 13666, 13679, 13667, 13680, 13699, 13711, 13730, 13737, 13742, 13700, 13712, 13731, 13738, 13743, 13747, 13756, 13760, 13781, 13793, 13801, 13810, 13830, 13748, 13750, 13757, 13761, 13770, 13771, 13782, 13787, 13794, 13799, 13811, 13825, 13827, 13831, 13834, 13839, 13851, 13859, 13863, 13867, 13873, 13877, 13835, 13840, 13842, 13848, 13852, 13860, 13864, 13868, 13874, 13878, 13885, 13886, 13891, 13896, 13901, 13918, 13927, 13933, 13939, 13951, 13886, 13888, 13892, 13897, 13899, 13901, 13919, 13934, 13940, 13952, 13955, 13973, 13979, 13983, 13997, 13984, 13998, 14006, 14011, 14019, 14022, 14031, 14047, 14053, 14061, 14075, 14111, 14116, 14124, 14149, 14007, 14012, 14016, 14023, 14032, 14048, 14054, 14062, 14076, 14112, 14117, 14119, 14125, 14128, 14129, 14131, 14146, 14150, 14153, 14159, 14163, 14168, 14173, 14177, 14154, 14160, 14164, 14169, 14174, 14178, 14181, 14206, 14213, 14219, 14237, 14248, 14252, 14258, 14264, 14271, 14275, 14279, 14295, 14308, 14311, 14314, 14318, 14332, 14335, 14339, 14343, 14207, 14209, 14214, 14220, 14222, 14232, 14234, 14238, 14249, 14253, 14259, 14265, 14272, 14276, 14280, 14288, 14296, 14309, 14315, 14319, 14321, 14326, 14333, 14336, 14362, 14370, 14377, 14371 and SEQ ID NO:14378.

[0283] For each genomic sequence listed, the following oligonucleotides as detailed in the sequence listing may be used for a combined MSP-RealTime analysis:

[0284] Taqman Real-time single probe detection assays:

### SEQ ID NO: 41

[0285] left Primer: 2751, 2754, 2757, 2759, 2767, 2768, 2772, 2776, 2779, 2784, 2785, 2786, 2789, 2791, 2792, 2794, 2797, 2798, 2801, 2805, 2806, 2809, 2811, 2815, 2817, 2824, 2830, 2832, 2833, 2834, 2838, 2840, 2843, 2846, 2850, 2851, 2853, 2855, 2859, 2866, 2867, 2870, 2871, 2876, 2878, 2881, 2885, 2886, 2892, 2893, 2895, 2896, 2898, 2904, 2912, 2915, 2917, 2919, 2922, 2923, 2929, 2931, 2939, 2941, 2944, 2946, 2948, 2950, 2955, 2956, 2957, 2960, 2962, 2965, 2966, 2967, 2968, 2969, 2971, 2975, 2976, 2977, 2978, 2979, 2980, 2981, 2984, 2988, 2989, 2990, 2992, 2994, 2997, 2999, 3001, 3002, 3004, 3006, 3007, 3008, 3010, 3013, 3014, 3016, 3017, 3018, 3020, 3022, 3025,

[0286] right Primer: 2752, 2755, 2760, 2762, 2763, 2764, 2765, 2769, 2771, 2773, 2775, 2777, 2780, 2781, 2782, 2783, 2787, 2788, 2790, 2793, 2795, 2796, 2800, 2802, 2803, 2804, 2808, 2810, 2812, 2814, 2816, 2818, 2820, 2821, 2823, 2825, 2827, 2828, 2829, 2831, 2835, 2836, 2837, 2839, 2841, 2842, 2844, 2845, 2847, 2849, 2852, 2854, 2856, 2858, 2860, 2861, 2862, 2863, 2864, 2865, 2868, 2869, 2872, 2873, 2874, 2875, 2877, 2879, 2880, 2882, 2883, 2884, 2887, 2888, 2889, 2890, 2891, 2894, 2897, 2899, 2901, 2902, 2903, 2905, 2907, 2909, 2911, 2914, 2916, 2918, 2920, 2924, 2926, 2927, 2928, 2930, 2932, 2933, 2934, 2935, 2936, 2937, 2938, 2942, 2945, 2947, 2949, 2951, 2953, 2954, 2958, 2959, 2961, 2963, 2970, 2972, 2973, 2974, 2982, 2985, 2987, 2991, 2993, 2995, 2996, 2998, 3000, 3003, 3005, 3011, 3019, 3021, 3023, 3026, 3027,

[0287] Detection: 2753, 2756, 2758, 2761, 2766, 2770, 2774, 2778, 2799, 2807, 2813, 2819, 2822, 2826, 2848, 2857, 2900, 2906, 2908, 2910, 2913, 2921, 2925, 2940, 2943, 2952, 2964, 2983, 2986, 3009, 3012, 3015, 3024,

### SEQ ID NO: 5

[0288] left Primer: 3028, 3032, 3033, 3036, 3037, 3038, 3039, 3041, 3042, 3043, 3044, 3047, 3048, 3049, 3052, 3055, 3059, 3061, 3064, 3065, 3068, 3069, 3071, 3072, 3075, 3076, 3080, 3083, 3084, 3085, 3086, 3091, 3093, 3096, 3097, 3100, 3104, 3109, 3110, 3113, 3115, 3117, 3118, 3123, 3126, 3127, 3130, 3134, 3135, 3136, 3138, 3139, 3144, 3146, 3147, 3149, 3150, 3155,

[0289] right Primer: 3029, 3031, 3034, 3040, 3045, 3050, 3051, 3053, 3054, 3056, 3057, 3060, 3063, 3066, 3073, 3078, 3081, 3088, 3089, 3090, 3092, 3094, 3098, 3101, 3103, 3105, 3107, 3108, 3111, 3114, 3116, 3119, 3121, 3122, 3124, 3128, 3131, 3133, 3137, 3140, 3142, 3145, 3148, 3151, 3152, 3153, 3157,

[0290] Detection: 3030, 3035, 3046, 3058, 3062, 3067, 3070, 3074, 3077, 3079, 3082, 3087, 3095, 3099, 3102, 3106, 3112, 3120, 3125, 3129, 3132, 3141, 3143, 3154, 3156, 3158,

### SEQ ID NO: 6

[0291] left Primer: 3159, 3165, 3166, 3167, 3170, 3171, 3172, 3174, 3175, 3176, 3179, 3180, 3181, 3184, 3185, 3186, 3192, 3194, 3198, 3201, 3202, 3203, 3204, 3206, 3209, 3212, 3213, 3215, 3216, 3217, 3218, 3221, 3224, 3226, 3228, 3229, 3230, 3232, 3233, 3234, 3235, 3237, 3238, 3239, 3245, 3247, 3248, 3249,

[0292] right Primer: 3160, 3162, 3163, 3164, 3168, 3169, 3173, 3178, 3182, 3183, 3187, 3189, 3190, 3195, 3196, 3197, 3199, 3205, 3207, 3210, 3214, 3219, 3222, 3223, 3225, 3227, 3236, 3240, 3242, 3243, 3244, 3246, 3250,

[0293] Detection: 3161, 3177, 3188, 3191, 3193, 3200, 3208, 3211, 3220, 3231, 3241, 3251,

### SEQ ID NO: 8

[0294] left Primer: 3252, 3256, 3261, 3264, 3268, 3269, 3270, 3273, 3275, 3279, 3280, 3281, 3282, 3283, 3284, 3285, 3286, 3290, 3292, 3295, 3297, 3301, 3304, 3305, 3306, 3307, 3308, 3310, 3311, 3312, 3315, 3319, 3320, 3324, 3327, 3331, 3333, 3334, 3339, 3348, 3351, 3354, 3358, 3360, 3364, 3367, 3368, 3374, 3376,

[0295] right Primer: 3253, 3255, 3257, 3259, 3260, 3262, 3265, 3266, 3267, 3271, 3274, 3276, 3278, 3287, 3289, 3291, 3293, 3298, 3300, 3302, 3309, 3313, 3314, 3316, 3318, 3321, 3322, 3325, 3328, 3330, 3332, 3335, 3337, 3338, 3340, 3342, 3343, 3344, 3345, 3346, 3347, 3349, 3350, 3352, 3353, 3355, 3356, 3357, 3359, 3361, 3363, 3365, 3369, 3371, 3372, 3373,

[0296] Detection: 3254, 3258, 3263, 3272, 3277, 3288, 3294, 3296, 3299, 3303, 3317, 3323, 3326, 3329, 3336, 3341, 3362, 3366, 3370, 3375,

### SEQ ID NO: 16

[0297] left Primer: 3377, 3380, 3383, 3386, 3388, 3389, 3390, 3391, 3392, 3395, 3396, 3400, 3401,

[0298] right Primer: 3378, 3381, 3384, 3385, 3393, 3397, 3399, 3402,

[0299] Detection: 3379, 3382, 3387, 3394, 3398,

### SEQ ID NO: 42

[0300] left Primer: 3403, 3406, 3408, 3413, 3414, 3417, 3420, 3423, 3428, 3432, 3433, 3434, 3436, 3439, 3440, 3442, 3443, 3445, 3447, 3453, 3455, 3458, 3463, 3466, 3469, 3470, 3471, 3472, 3473, 3474, 3475, 3477, 3478, 3480, 3481, 3483, 3484, 3487, 3490, 3494, 3495, 3496, 3497, 3499, 3500, 3504, 3505, 3508, 3512, 3514, 3515, 3516, 3521, 3525, 3529, 3533, 3534, 3537, 3538, 3540, 3541, 3542, 3543, 3544, 3547, 3548, 3553, 3557, 3558, 3559, 3560, 3562, 3563, 3566, 3571, 3574, 3575, 3577, 3580, 3583, 3584, 3585, 3586, 3592, 3594, 3595, 3597, 3598, 3599, 3601, 3603, 3604, 3607, 3608, 3612, 3619, 3621, 3622, 3626, 3631, 3632, 3637, 3638, 3639, 3640, 3642, 3643, 3644, 3646, 3647, 3649, 3650, 3652, 3656, 3657, 3660, 3663, 3668, 3670, 3673, 3676, 3677, 3678, 3683, 3688, 3690, 3694, 3697, 3700, 3702, 3703, 3704, 3708,

[0301] right Primer: 3404, 3409, 3411, 3415, 3418, 3419, 3421, 3424, 3426, 3427, 3429, 3431, 3435, 3437, 3438, 3441, 3444, 3446, 3448, 3450, 3452, 3454, 3456, 3459, 3461, 3462, 3464, 3467, 3476, 3479, 3482, 3485, 3488, 3489, 3491, 3492, 3493, 3501, 3503, 3506, 3509, 3510, 3511, 3513, 3517, 3518, 3519, 3520, 3522, 3524, 3526, 3527, 3528, 3530, 3531, 3535, 3536, 3545, 3549, 3551, 3552, 3554, 3555, 3556, 3561, 3564, 3565, 3568, 3569, 3570, 3573, 3576, 3578, 3581, 3587, 3588, 3589, 3590, 3591, 3593, 3596, 3600, 3602, 3605, 3606, 3609, 3611, 3613, 3614, 3615, 3616, 3617, 3618, 3623, 3624, 3625, 3627, 3629, 3630, 3633, 3634, 3635, 3636, 3641, 3645, 3651, 3653, 3654, 3655, 3658, 3661, 3662, 3665, 3666, 3667, 3669, 3671, 3674, 3679, 3681, 3684, 3686, 3689, 3691, 3692, 3693, 3695, 3696, 3698, 3701, 3705, 3706, 3707, 3709,

[0302] Detection: 3405, 3407, 3410, 3412, 3416, 3422, 3425, 3430, 3449, 3451, 3457, 3460, 3465, 3468, 3486, 3498, 3502, 3507, 3523, 3532, 3539, 3546, 3550, 3567, 3572, 3579, 3582, 3610, 3620, 3628, 3648, 3659, 3664, 3672, 3675, 3680, 3682, 3685, 3687, 3699,

### SEQ ID NO: 14

[0303] left Primer: 3710, 3714, 3715, 3717, 3718, 3722, 3723, 3729, 3730, 3732, 3735, 3739, 3740, 3741, 3743, 3744, 3745, 3746, 3749, 3753, 3754, 3755, 3756,

[0304] right Primer: 3711, 3713, 3719, 3721, 3724, 3725, 3726, 3727, 3728, 3731, 3733, 3736, 3737, 3738, 3742, 3747, 3748, 3750, 3752, 3757, 3758, 3759, 3760,

[0305] Detection: 3712, 3716, 3720, 3734, 3751,

### SEQ ID NO: 43

[0306] left Primer: 3761, 3764, 3767, 3771, 3773, 3775, 3776, 3777, 3781, 3785, 3786, 3787, 3790, 3791, 3793, 3796, 3797, 3798, 3799, 3805, 3809, 3814, 3817, 3818, 3822, 3823, 3828, 3833, 3836, 3844, 3847, 3850, 3851, 3853, 3856, 3857, 3862, 3873, 3876, 3877, 3880, 3885, 3887, 3889, 3890, 3892, 3893, 3895, 3896, 3899, 3902, 3903, 3905, 3906, 3907, 3908, 3916, 3923, 3926, 3927, 3930, 3935, 3936, 3938, 3939, 3940, 3944, 3945, 3949, 3950, 3951, 3954, 3955, 3957, 3960, 3965, 3970, 3971, 3978, 3979, 3982, 3983, 3984, 3985,

[0307] right Primer: 3762, 3765, 3768, 3770, 3772, 3774, 3778, 3779, 3780, 3782, 3784, 3788, 3792, 3794, 3800, 3801, 3802, 3803, 3804, 3806, 3807, 3808, 3810, 3812, 3813, 3815, 3819, 3820, 3821, 3824, 3826, 3827, 3829, 3831, 3832, 3834, 3837, 3838, 3839, 3840, 3842, 3845, 3848, 3852, 3854, 3858, 3860, 3861, 3863, 3864, 3865, 3866, 3867, 3868, 3869, 3870, 3871, 3872, 3874, 3875, 3878, 3881, 3883, 3884, 3886, 3888, 3891, 3894, 3897, 3898, 3900, 3901, 3904, 3909, 3911, 3914, 3915, 3917, 3919, 3920, 3921, 3922, 3924, 3928, 3931, 3933, 3934, 3937, 3941, 3942, 3943, 3947, 3948, 3952, 3958, 3959, 3961, 3962, 3963, 3964, 3966, 3968, 3972, 3974, 3975, 3976, 3980, 3981, 3986,

[0308] Detection: 3763, 3766, 3769, 3783, 3789, 3795, 3811, 3816, 3825, 3830, 3835, 3841, 3843, 3846, 3849, 3855, 3859, 3879, 3882, 3910, 3912, 3913, 3918, 3925, 3929, 3932, 3946, 3953, 3956, 3967, 3969, 3973, 3977,

### SEQ ID NO: 15

[0309] left Primer: 3987, 3990, 3993, 3994, 3997, 4000, 4003, 4004, 4006, 4012, 4015, 4017, 4020, 4024, 4027, 4029, 4031, 4032, 4033, 4037, 4038, 4040, 4042, 4047, 4048, 4050, 4051, 4052, 4054, 4055, 4058, 4063, 4066, 4069, 4070, 4072, 4073, 4076, 4078, 4079, 4082, 4083, 4084, 4085, 4086, 4090, 4093, 4094, 4095, 4096, 4099, 4100, 4104, 4106, 4113, 4116, 4119, 4120, 4124, 4127, 4130, 4134, 4135, 4136, 4138, 4142, 4145, 4146, 4149, 4150, 4152, 4153, 4159, 4160, 4161, 4163, 4168, 4169, 4171, 4173, 4176, 4180, 4181, 4185, 4189, 4191, 4192, 4194, 4197, 4198, 4199, 4201, 4206, 4207, 4208, 4213, 4219, 4220, 4223, 4224, 4225, 4228, 4231, 4232, 4233, 4237, 4238, 4242, 4243, 4246, 4247, 4251, 4254, 4255, 4256, 4258,

[0310] right Primer: 3988, 3991, 3995, 3998, 4001, 4005, 4007, 4009, 4010, 4011, 4013, 4016, 4018, 4019, 4021, 4022, 4023, 4025, 4028, 4034, 4035, 4039, 4043, 4045, 4046, 4049, 4056, 4059, 4061, 4064, 4065, 4067, 4068, 4071, 4074, 4075, 4077, 4080, 4087, 4088, 4089, 4092, 4098, 4101, 4102, 4105, 4108, 4109, 4110, 4111, 4112, 4114, 4115., 4117, 4121, 4122, 4123, 4125, 4128, 4129, 4131, 4132, 4133, 4137, 4139, 4141, 4144, 4148, 4151, 4154, 4156, 4157, 4162, 4165, 4166, 4167, 4170, 4172, 4174, 4177, 4179, 4182, 4184, 4186, 4188, 4190, 4195, 4196, 4202, 4204, 4205, 4209, 4211, 4214, 4216, 4217, 4218, 4221, 4226, 4229, 4234, 4236, 4239, 4241, 4244, 4245, 4248, 4249, 4252, 4257, 4259, 4260, 4261,

[0311] Detection: 3989, 3992,3996, 3999, 4002, 4008, 4014, 4026, 4030, 4036, 4041, 4044, 4053, 4057, 4060, 4062, 4081, 4091, 4097, 4103, 4107, 4118, 4126, 4140, 4143, 4147, 4155, 4158, 4164, 4175, 4178, 4183, 4187, 4193, 4200, 4203, 4210, 4212, 4215, 4222, 4227, 4230, 4235, 4240, 4250, 4253,

### SEQ ID NO:4

[0312] left Primer: 4262, 4266, 4267, 4268, 4271, 4272, 4275, 4276, 4279, 4281, 4282, 4284, 4285, 4287, 4289, 4290, 4292, 4295, 4297, 4299, 4301, 4306, 4310, 4316, 4317, 4318, 4321, 4323, 4325, 4328, 4334, 4335, 4337, 4341, 4342, 4343, 4344, 4348, 4350, 4351, 4352, 4354, 4357, 4358, 4359, 4364, 4365, 4366, 4370, 4371, 4372, 4373, 4376, 4378, 4381, 4383, 4384, 4386, 4388, 4396, 4397, 4399, 4400, 4403, 4405, 4407, 4409, 4412, 4415, 4416, 4417, 4424, 4426, 4429, 4433, 4435, 4437, 4442, 4443, 4447, 4450, 4451, 4452, 4455, 4457, 4460, 4461, 4462, 4465, 4466, 4469, 4470, 4474, 4478, 4481, 4484, 4488, 4491, 4494, 4495, 4497, 4498, 4504, 4506, 4509, 4510, 4511, 4514, 4516, 4518, 4520, 4521, 4523, 4525, 4528, 4530, 4533, 4534, 4535, 4538, 4540, 4542, 4545, 4547, 4548, 4553, 4554, 4555, 4556, 4557, 4562, 4564, 4567, 4568, 4569, 4579, 4580, 4582, 4584, 4587, 4589, 4593, 4596, 4597, 4598, 4600, 4601, 4602, 4605, 4606, 4607, 4609, 4610, 4613, 4614, 4616, 4618, 4621, 4624, 4626, 4627, 4628, 4631, 4632, 4636, 4639, 4641, 4644, 4645, 4648,

[0313] right Primer: 4263, 4265, 4269, 4270, 4273, 4274, 4277, 4280, 4283, 4286, 4288, 4291, 4293, 4296, 4298, 4300, 4302, 4303, 4304, 4305, 4307, 4308, 4309, 4311, 4313, 4315, 4319, 4322, 4324, 4326, 4327, 4330, 4331, 4332, 4333, 4336, 4338, 4340, 4345, 4347, 4349, 4353, 4355, 4360, 4361, 4362, 4367, 4368, 4369, 4374, 4375, 4377, 4379, 4382, 4385, 4387, 4389, 4390, 4391, 4392, 4393, 4394, 4395, 4398, 4401, 4406, 4408, 4410, 4411, 4413, 4418, 4420, 4422, 4423, 4425, 4427, 4428, 4430, 4432, 4434, 4436, 4438, 4440, 4441, 4444, 4446, 4448, 4453, 4454, 4456, 4458, 4463, 4464, 4467, 4471, 4472, 4473, 4475, 4476, 4477, 4479, 4480, 4482, 4485, 4486, 4487, 4489, 4490, 4492, 4496, 4499, 4501, 4502, 4503, 4505, 4507, 4508, 4512, 4515, 4517, 4519, 4522, 4524, 4529, 4531, 4536, 4537, 4539, 4541, 4543, 4546, 4549, 4551, 4558, 4559, 4560, 4561, 4563, 4565, 4570, 4571, 4572, 4573, 4574, 4575, 4576, 4578, 4581, 4583, 4585, 4586, 4588, 4590, 4592, 4595, 4599, 4603, 4611, 4612, 4615, 4617, 4619, 4620, 4622, 4630, 4633, 4634, 4635, 4638, 4640, 4642, 4643, 4646, 4647,

[0314] Detection: 4264, 4278, 4294, 4312, 4314, 4320, 4329, 4339, 4346, 4356, 4363, 4380, 4402, 4404, 4414, 4419, 4421, 4431, 4439, 4445, 4449, 4459, 4468, 4483, 4493, 4500, 4513, 4526, 4527, 4532, 4544, 4550, 4552, 4566, 4577; 4591, 4594, 4604, 4608, 4623, 4625, 4629, 4637,

### SEQ ID NO: 7

[0315] left Primer: 4649, 4652, 4655, 4659, 4661, 4663, 4664, 4665, 4668, 4671, 4674, 4675, 4676, 4678, 4680, 4683, 4686, 4690, 4696, 4700, 4703, 4704, 4706, 4709, 4711, 4714, 4715, 4717, 4718, 4719, 4720, 4721, 4726, 4727, 4730, 4732, 4738, 4742, 4745, 4749, 4750, 4753, 4755, 4759, 4763, 4768, 4769, 4772, 4773, 4776, 4778, 4779, 4782, 4784, 4789, 4790, 4794, 4797, 4801, 4805, 4807, 4813, 4814, 4819, 4821, 4822, 4827, 4829, 4833, 4834, 4835, 4837, 4838, 4841, 4842, 4843, 4844, 4847, 4849, 4850, 4852, 4853, 4859, 4860, 4861, 4865, 4867, 4868, 4869, 4870, 4873, 4876, 4877, 4878, 4879, 4883, 4885, 4889, 4891, 4892, 4894, 4895, 4897, 4898, 4903, 4906, 4911, 4912, 4918, 4919, 4920, 4924, 4927, 4929, 4932, 4934, 4941, 4942, 4945, 4948, 4949, 4950,

[0316] right Primer: 4650, 4653, 4656, 4658, 4660, 4662, 4666, 4667, 4669, 4670, 4672, 4677, 4681, 4684, 4685, 4687, 4688, 4689, 4691, 4693, 4694, 4695, 4697, 4699, 4701, 4702, 4705, 4707, 4708, 4716, 4722, 4724, 4728, 4731, 4733, 4735, 4736, 4737, 4739, 4741, 4744, 4746, 4748, 4751, 4754, 4756, 4758, 4760, 4761, 4764, 4766, 4767, 4770, 4771, 4774, 4777, 4780, 4783, 4785, 4786, 4787, 4788, 4791, 4792, 4793, 4795, 4798, 4800, 4802, 4804, 4806, 4808, 4810, 4811, 4812, 4815, 4816, 4817, 4818, 4820, 4823, 4824, 4825, 4828, 4830, 4832, 4836, 4839, 4840, 4845, 4846, 4848, 4851, 4854, 4855, 4856, 4857, 4858, 4862, 4864, 4871, 4872, 4874, 4875, 4881, 4882, 4884, 4886, 4887, 4890, 4893, 4896, 4899, 4900, 4901, 4902, 4904, 4905, 4907, 4908, 4909, 4910, 4913, 4915, 4917, 4921, 4922, 4923, 4925, 4926, 4928, 4930, 4935, 4936, 4937, 4938, 4940, 4943, 4944, 4946, 4947, 4951, 4952,

[0317] Detection: 4651, 4654, 4657, 4673, 4679, 4682, 4692, 4698, 4710, 4712, 4713, 4723, 4725, 4729, 4734, 4740, 4743, 4747, 4752, 4757, 4762, 4765, 4775, 4781, 4796, 4799, 4803, 4809, 4826, 4831, 4863, 4866, 4880, 4888, 4914, 4916, 4931, 4933, 4939,

### SEQ ID NO: 44

[0318] left Primer: 4953,

[0319] right Primer: 4954, 4956,

[0320] Detection: 4955,

### SEQ ID NO:1

[0321] left Primer: 4957, 4960, 4963, 4967, 4970, 4971, 4972, 4976, 4977, 4985, 4986, 4987, 4989, 4991, 4992, 4997, 4999, 5002, 5003, 5004, 5006, 5010, 5013, 5014, 5015, 5017, 5018, 5019, 5020, 5021, 5024, 5025, 5027, 5031, 5032, 5033, 5037, 5040, 5041, 5042, 5043,

[0322] right Primer: 4958, 4961, 4964, 4966, 4968, 4969, 4973, 4974, 4975, 4978, 4979, 4980, 4981, 4982, 4983, 4984, 4988, 4990, 4993, 4995, 4996, 4998, 5000, 5005, 5007, 5009, 5011, 5016, 5022, 5026, 5028, 5030, 5034, 5036, 5038, 5039,

[0323] Detection: 4959, 4962, 4965, 4994, 5001, 5008, 5012, 5023, 5029, 5035,

### SEQ ID NO:2

[0324] left Primer: 5044, 5047, 5049, 5050, 5052, 5054, 5055, 5057, 5060, 5061, 5064,

[0325] right Primer: 5045, 5048, 5051, 5053, 5056, 5058, 5062, 5065,

[0326] Detection: 5046, 5059, 5063,

### SEQ ID NO: 45

[0327] left Primer: 5066, 5069, 5073, 5077, 5080, 5083, 5087, 5093, 5096, 5099, 5100, 5103, 5104, 5106, 5111, 5116, 5119, 5120, 5125, 5128, 5132, 5134, 5135, 5137, 5139, 5140, 5142, 5144, 5148, 5149, 5150, 5155, 5157, 5158, 5160, 5166, 5168, 5170, 5171, 5173, 5176, 5177, 5179, 5184, 5187, 5188, 5190, 5193, 5195, 5198, 5201, 5204, 5208, 5211, 5215, 5216, 5217, 5220, 5221, 5222, 5224, 5226, 5229, 5230, 5231, 5232, 5234, 5237, 5242, 5244, 5245, 5246, 5247, 5249, 5250, 5252, 5254, 5255, 5256, 5261, 5262, 5264, 5265, 5273, 5274, 5276, 5278, 5279, 5281, 5284, 5285, 5286, 5287, 5288, 5289, 5292, 5296, 5300, 5303, 5304, 5307, 5308, 5309, 5313, 5315, 5317, 5318, 5322, 5323, 5326, 5329, 5330, 5333, 5336, 5337, 5341, 5343, 5348, 5349, 5352, 5354, 5355, 5358, 5359, 5361, 5362, 5363, 5364, 5365, 5367, 5369, 5370, 5372, 5375, 5377, 5379, 5382, 5385, 5387, 5393, 5394, 5395, 5398, 5400, 5404, 5407, 5408, 5409, 5412, 5413, 5414, 5416, 5418, 5421, 5424, 5426, 5428, 5431, 5432, 5433, 5434, 5435, 5437, 5440, 5441, 5443, 5448, 5450, 5451, 5454, 5455, 5458, 5460, 5461, 5464, 5468, 5470, 5471, 5474, 5475, 5477, 5482, 5484, 5485, 5487, 5490, 5491, 5492, 5494, 5496, 5498, 5499, 5500, 5501, 5502, 5503, 5504, 5506, 5509, 5510, 5512, 5516, 5517, 5518, 5524, 5525, 5526, 5528, 5531, 5533, 5534, 5535, 5536, 5537, 5540, 5542, 5544, 5545, 5546, 5549, 5550, 5552, 5553, 5559, 5561, 5566, 5569, 5572, 5573, 5575, 5577, 5578, 5579, 5580, 5581, 5582, 5588, 5593, 5595, 5596, 5598, 5600, 5601, 5603, 5604, 5605, 5608, 5614, 5615, 5616, 5619, 5622, 5624, 5625, 5628, 5629, 5633, 5634, 5637, 5638, 5639, 5643, 5644, 5645, 5647, 5648, 5649, 5650, 5654, 5662,5664,

[0328] right Primer: 5067, 5070, 5072, 5074, 5075, 5076, 5078, 5081, 5084, 5086, 5088, 5090, 5091, 5094, 5097, 5101, 5105, 5107, 5109, 5110, 5112, 5114, 5115, 5117, 5121, 5123, 5124, 5126, 5129, 5131, 5136, 5143, 5145, 5147, 5151, 5153, 5156, 5159, 5161, 5162, 5163, 5164, 5165, 5167, 5169, 5172, 5174, 5175, 5180, 5181, 5182, 5183, 5185, 5186, 5189, 5191, 5194, 5196, 5199, 5200, 5202, 5203, 5205, 5207, 5209, 5210, 5212, 5214, 5218, 5219, 5223, 5225, 5227, 5233, 5235, 5238, 5239, 5240, 5241, 5248, 5251, 5253, 5257, 5259, 5260, 5263, 5266, 5268, 5269, 5270, 5271, 5272, 5280, 5282, 5290, 5291, 5293, 5295, 5297, 5299, 5301, 5306, 5310, 5311, 5312, 5314, 5316, 5319, 5321, 5324, 5327, 5331, 5332, 5334, 5338, 5339, 5340, 5342, 5344, 5346, 5347, 5351, 5353, 5356, 5360, 5366, 5368, 5371, 5373, 5376, 5378, 5380, 5383, 5388, 5389, 5391, 5392, 5396, 5399, 5401, 5403, 5405, 5410, 5415, 5417, 5419, 5420, 5422, 5425, 5427, 5429, 5436, 5438, 5442, 5444, 5445, 5446, 5447, 5449, 5452, 5456, 5457, 5459, 5462, 5465, 5466, 5467, 5469, 5472, 5478, 5480, 5481, 5486, 5488, 5493, 5495, 5497, 5505, 5507, 5508, 5511, 5513, 5515, 5519, 5521, 5522, 5527, 5529, 5532, 5538, 5539, 5541, 5543, 5548, 5551, 5554, 5555, 5556, 5557, 5558, 5560, 5562, 5563, 5564, 5565, 5567, 5568, 5570, 5571, 5574, 5576, 5583, 5585, 5586, 5587, 5589, 5591, 5592, 5594, 5597, 5599, 5602, 5606, 5609, 5611, 5612, 5618, 5620, 5623, 5626, 5627, 5630, 5632, 5635, 5640, 5642, 5646, 5651, 5652, 5656, 5657, 5659, 5660, 5661, 5663, 5665,

[0329] Detection: 5068, 5071, 5079, 5082, 5085, 5089, 5092, 5095, 5098, 5102, 5108, 5113, 5118, 5122, 5127, 5130, 5133, 5138, 5141, 5146, 5152, 5154, 5178, 5192, 5197, 5206, 5213, 5228, 5236, 5243, 5258, 5267, 5275, 5277, 5283, 5294, 5298, 5302, 5305, 5320, 5325, 5328, 5335, 5345, 5350, 5357, 5374, 5381, 5384, 5386, 5390, 5397, 5402, 5406, 5411, 5423, 5430, 5439, 5453, 5463, 5473, 5476, 5479, 5483, 5489, 5514, 5520, 5523, 5530, 5547, 5584, 5590, 5607, 5610, 5613, 5617, 5621, 5631, 5636, 5641, 5653, 5655, 5658, 5666,

### SEQ ID NO: 9

[0330] left Primer: 5667, 5670, 5672, 5673, 5676, 5678, 5679, 5681, 5682, 5683, 5686, 5687, 5688, 5690, 5694, 5697, 5698, 5699, 5700, 5701, 5704, 5708, 5709, 5711, 5713, 5714, 5717, 5721, 5723, 5724, 5727, 5728, 5733, 5734, 5735, 5736, 5739, 5740, 5741, 5742, 5743,

[0331] right Primer: 5668, 5671, 5674, 5677, 5680, 5684, 5689, 5691, 5693, 5696, 5702, 5705, 5707, 5710, 5712, 5715, 5718, 5720, 5722, 5725, 5729, 5730, 5731, 5732, 5737,

[0332] Detection: 5669, 5675, 5685, 5692, 5695, 5703, 5706, 5716, 5719, 5726, 5738,

### SEQ ID NO:46

[0333] left Primer: 5744, 5747, 5750, 5753, 5759, 5762, 5763, 5770, 5775, 5777, 5778, 5780, 5782, 5785, 5787, 5791, 5792, 5793, 5794, 5797, 5801, 5803, 5808, 5810, 5812, 5814, 5816, 5817, 5824, 5832, 5833, 5834, 5835, 5838, 5840, 5841, 5844, 5849, 5853, 5854, 5857, 5859, 5860, 5862, 5863, 5865, 5868, 5874, 5882, 5883, 5885, 5887, 5894, 5895, 5896, 5897, 5902, 5904, 5906, 5909, 5912, 5915, 5918, 5919, 5920, 5922, 5923, 5926, 5927, 5928, 5930, 5932, 5933, 5934, 5935, 5939, 5940, 5946, 5947, 5948, 5949, 5952, 5954, 5955, 5956, 5958, 5959, 5961, 5962, 5964, 5965, 5968, 5970, 5971, 5972, 5973, 5977, 5978, 5980, 5983, 5986, 5987, 5992, 5993, 5996, 5997, 6000, 6002, 6003, 6004, 6005, 6006, 6008, 6009, 6010, 6011, 6012, 6013, 6017, 6018, 6019, 6020, 6025, 6027, 6030, 6033, 6035, 6036, 6039, 6041, 6042, 6045, 6049, 6050, 6051, 6055, 6059, 6063, 6064, 6065, 6067, 6070, 6072, 6073, 6075, 6077, 6078, 6081,

[0334] right Primer: 5745, 5748, 5751, 5754, 5756, 5758, 5760, 5764, 5766, 5767, 5768, 5769, 5771, 5773, 5774, 5776, 5779, 5781, 5783, 5786, 5788, 5789, 5790, 5795, 5796, 5798, 5800, 5802, 5804, 5806, 5807, 5809, 5811, 5813, 5818, 5820, 5821, 5822, 5823, 5825, 5826, 5827, 5828, 5830, 5831, 5836, 5837, 5839, 5842, 5843, 5845, 5846, 5847, 5848, 5850, 5852, 5855, 5856, 5858, 5861, 5864, 5866, 5867, 5870, 5871, 5872, 5873, 5875, 5876, 5877, 5878, 5879, 5880, 5881, 5884, 5886, 5888, 5889, 5890, 5891, 5892, 5893, 5898, 5899, 5900, 5903, 5905, 5907, 5910, 5913, 5916, 5921, 5924, 5929, 5931, 5936, 5937, 5938, 5942, 5943, 5944, 5945, 5950, 5953, 5957, 5960, 5963, 5966, 5969, 5975, 5976, 5981, 5984, 5988, 5990, 5991, 5994, 5998, 5999, 6001, 6007, 6014, 6015, 6016, 6021, 6023, 6024, 6026, 6028, 6031, 6032, 6034, 6037, 6038, 6040, 6043, 6046, 6048, 6053, 6054, 6056, 6058, 6060, 6062, 6066, 6068, 6074, 6076, 6079, 6083, 6084,

[0335] Detection: 5746, 5749, 5752, 5755, 5757, 5761, 5765, 5772, 5784, 5799, 5805, 5815, 5819, 5829, 5851, 5869, 5901, 5908, 5911, 5914, 5917, 5925, 5941, 5951, 5967, 5974, 5979, 5982, 5985, 5989, 5995, 6022, 6029, 6044, 6047, 6052, 6057, 6061, 6069, 6071, 6080, 6082,

### SEQ ID NO: 10

[0336] left Primer: 6085, 6089, 6090, 6093, 6096, 6098, 6100, 6106, 6110, 6111, 6114, 6118, 6121, 6127, 6130, 6133, 6135, 6137, 6138, 6141, 6143, 6145, 6148, 6150, 6151, 6152, 6153, 6154, 6156, 6159, 6160, 6162, 6163, 6166, 6167, 6168, 6169, 6170, 6171, 6172, 6175, 6177, 6180, 6183, 6187, 6188, 6190, 6193, 6194, 6195, 6196, 6198, 6201, 6202, 6204, 6207, 6211, 6212, 6214, 6215, 6216, 6218, 6219, 6220, 6222, 6225, 6226, 6230, 6235, 6239, 6241, 6242, 6243, 6244, 6245, 6247, 6250, 6252, 6254, 6259, 6260, 6261, 6264, 6265, 6268, 6270, 6273, 6275, 6278, 6280, 6282, 6286, 6287, 6288, 6291, 6293, 6298, 6299, 6300, 6302, 6303, 6305, 6307, 6308, 6312, 6313, 6314, 6315, 6316, 6317, 6318, 6320, 6321, 6323, 6325, 6327, 6328, 6334, 6335, 6337, 6340, 6341, 6344, 6348, 6350, 6353, 6354, 6357, 6360, 6362, 6364, 6368, 6372, 6374, 6377, 6378, 6383, 6386, 6392, 6394, 6398, 6400, 6404, 6405, 6409, 6410, 6411, 6417, 6418, 6424, 6426, 6429, 6431, 6432, 6433, 6435, 6436, 6437, 6438, 6440, 6442, 6445, 6446, 6448, 6449, 6452, 6455, 6457, 6458, 6461, 6462, 6463, 6464, 6465, 6470, 6473, 6475, 6478, 6480, 6481, 6484, 6485, 6486, 6489, 6491, 6492, 6494, 6498, 6502, 6504, 6505, 6507, 6511, 6513, 6514,

[0337] right Primer: 6086, 6088, 6091, 6094, 6097, 6099, 6101, 6103, 6105, 6108, 6112, 6115, 6116, 6117, 6119, 6120, 6122, 6123, 6125, 6126, 6128, 6131, 6132, 6134, 6136, 6139, 6142, 6144, 6146, 6149, 6155, 6157, 6161, 6164, 6173, 6174, 6176, 6178, 6181, 6182, 6184, 6186, 6189, 6191, 6192, 6197, 6199, 6200, 6205, 6206, 6208, 6210, 6213, 6221, 6223, 6224, 6227, 6229, 6231, 6232, 6233, 6234, 6236, 6237, 6238, 6240, 6246, 6248, 6251, 6253, 6255, 6256, 6257, 6258, 6262, 6266, 6269, 6271, 6272, 6274, 6276, 6277, 6281, 6283, 6284, 6285, 6289, 6292, 6294, 6295, 6296, 6297, 6301, 6304, 6306, 6309, 6310, 6311, 6319, 6322, 6324, 6326, 6329, 6330, 6331, 6333, 6336, 6338, 6342, 6345, 6347, 6349, 6351, 6355, 6356, 6358, 6359, 6361, 6365, 6367, 6369, 6371, 6373, 6375, 6376, 6379, 6381, 6382, 6384, 6387, 6388, 6389, 6390, 6393, 6395, 6397, 6399, 6401, 6402, 6403, 6406, 6407, 6412, 6413, 6414, 6415, 6416, 6419, 6420, 6421, 6422, 6423, 6425, 6427, 6428, 6434, 6441, 6443, 6444, 6447, 6450, 6451, 6453, 6459, 6460, 6466, 6467, 6468, 6469, 6471, 6472, 6474, 6476, 6479, 6482, 6487, 6490, 6493, 6496, 6497, 6499, 6500, 6501, 6503, 6506, 6508, 6510, 6512,

[0338] Detection: 6087, 6092,6095, 6102, 6104, 6107, 6109, 6113, 6124, 6129, 6140, 6147, 6158, 6165, 6179, 6185, 6203, 6209, 6217, 6228, 6249, 6263, 6267, 6279, 6290, 6332, 6339, 6343, 6346, 6352, 6363, 6366, 6370, 6380, 6385, 6391, 6396, 6408, 6430, 6439, 6454, 6456, 6477, 6483, 6488, 6495, 6509,

### SEQ ID NO: 11

[0339] left Primer: 6515, 6518, 6521, 6522, 6523, 6524, 6528, 6532, 6535, 6539, 6549, 6560, 6561, 6564, 6566, 6567, 6570, 6573, 6576, 6577, 6578, 6579, 6583, 6584, 6585, 6586, 6587, 6590, 6591, 6594, 6596, 6597, 6603, 6605, 6608, 6609, 6610, 6611, 6612, 6615, 6625, 6630, 6632, 6633, 6634, 6638, 6639, 6642, 6643, 6644, 6647, 6650, 6655, 6657, 6658, 6659, 6661, 6663, 6664, 6665, 6669, 6671, 6674, 6677, 6678, 6679, 6680, 6681, 6682, 6686, 6687, 6688, 6689, 6690, 6691, 6693, 6695, 6696, 6697, 6699, 6701, 6703, 6704, 6705, 6706, 6707, 6708, 6710, 6711, 6712, 6713, 6717, 6718, 6720, 6721, 6722, 6725, 6727, 6732, 6734, 6735, 6739, 6741, 6745, 6748, 6751, 6755, 6759, 6762, 6764, 6767, 6770, 6772, 6773, 6774, 6777, 6778, 6782, 6785, 6786, 6787, 6790, 6791, 6794, 6795, 6796, 6798, 6800, 6802, 6803, 6806, 6811, 6814, 6815, 6818, 6824, 6829, 6834, 6835, 6842,

[0340] right Primer: 6516, 6519, 6525, 6526, 6527, 6529, 6531, 6533, 6536, 6537, 6538, 6540, 6541, 6542, 6543, 6544, 6545, 6546, 6547, 6548, 6550, 6551, 6552, 6553, 6554, 6556, 6558, 6562, 6563, 6565, 6568, 6571, 6572, 6575, 6580, 6582, 6588, 6589, 6592, 6595, 6598, 6599, 6600, 6601, 6602, 6604, 6606, 6607, 6613, 6614, 6617, 6618, 6619, 6620, 6621, 6623, 6624, 6627, 6628, 6629, 6631, 6635, 6640, 6641, 6645, 6646, 6649, 6651, 6652, 6653, 6656, 6660, 6662, 6666, 6668, 6670, 6672, 6675, 6676, 6683, 6685, 6692, 6694, 6698, 6700, 6702, 6709, 6714, 6715, 6716, 6719, 6723, 6726, 6728, 6730, 6731, 6736, 6738, 6740, 6742, 6744, 6746, 6747, 6749, 6752, 6754, 6756, 6757, 6758, 6760, 6761, 6765, 6769, 6775, 6779, 6781, 6783, 6784, 6789, 6792, 6797, 6799, 6801, 6804, 6805, 6807, 6809, 6810, 6812, 6816, 6817, 6819, 6821, 6822, 6825, 6827, 6828, 6830, 6831, 6832, 6833, 6836, 6837, 6838, 6839, 6840, 6841, 6843,

[0341] Detection: 6517, 6520, 6530, 6534, 6555, 6557, 6559, 6569, 6574, 6581, 6593, 6616, 6622, 6626, 6636, 6637, 6648, 6654, 6667, 6673, 6684, 6724, 6729, 6733, 6737, 6743, 6750, 6753, 6763, 6766, 6768, 6771, 6776, 6780, 6788, 6793, 6808, 6813, 6820, 6823, 6826,

### SEQ ID NO: 12

[0342] left Primer: 6844, 6848, 6850, 6852, 6854, 6857, 6859, 6861, 6862, 6865, 6868, 6870, 6871, 6872, 6874, 6875, 6876, 6880, 6883, 6886, 6887, 6888, 6890, 6891, 6894, 6896, 6897, 6898, 6899, 6900, 6901, 6902, 6904, 6905, 6906, 6910, 6912, 6917, 6920,

[0343] right Primer: 6845, 6847, 6849, 6851, 6853, 6855, 6858, 6860, 6863, 6866, 6869, 6873, 6877, 6879, 6881, 6882, 6884, 6889, 6892, 6893, 6895, 6907, 6908, 6909, 6911, 6913, 6915, 6916, 6918,

[0344] Detection: 6846, 6856, 6864, 6867, 6878, 6885, 6903, 6914, 6919,

### SEQ ID NO: 13

[0345] left Primer: 6921, 6924, 6927, 6928, 6933, 6935, 6937, 6939, 6940, 6943, 6946, 6947, 6948, 6949, 6951, 6953, 6954, 6955, 6959, 6961, 6964, 6965, 6968, 6969, 6972, 6973, 6976, 6979, 6980,

[0346] right Primer: 6922, 6925, 6929, 6930, 6931, 6932, 6934, 6936, 6942, 6944, 6945, 6950, 6952, 6956, 6957, 6958, 6960, 6962, 6963, 6966, 6967, 6970, 6971, 6974, 6975, 6977, 6981,

[0347] Detection: 6923, 6926, 6938, 6941, 6978, 6982,

### SEQ ID NO:3

[0348] left Primer: 6983, 6986, 6992, 6995, 6998, 7002, 7006, 7013, 7017, 7022, 7024, 7027, 7030, 7032, 7036, 7037, 7040, 7050, 7052, 7055, 7056, 7058, 7059, 7060, 7064, 7067, 7072, 7074, 7076, 7077, 7084, 7085, 7086, 7087; 7088, 7089, 7090, 7091, 7096, 7097, 7100, 7102, 7109, 7110, 7113, 7114, 7115, 7118, 7121, 7123, 7124, 7131, 7133, 7135, 7136, 7138, 7139, 7140, 7144, 7146, 7148, 7149, 7158, 7159, 7160, 7163, 7165, 7166, 7168, 7172, 7175, 7178, 7180, 7181, 7183, 7185, 7186, 7187, 7192, 7194, 7199, 7202, 7203, 7204, 7205, 7207, 7208, 7213, 7214, 7216, 7220, 7221, 7227, 7228, 7230, 7233, 7235, 7237, 7239, 7243, 7245, 7246, 7248, 7249, 7251, 7255, 7256, 7260, 7263, 7264, 7265, 7266, 7268, 7269, 7272, 7276, 7277, 7278, 7279, 7280, 7281, 7283, 7284, 7287, 7291, 7295, 7299, 7302, 7303, 7306, 7309, 7310, 7311, 7314, 7315, 7320, 7321, 7324, 7325, 7329, 7331, 7332, 7334, 7336, 7339, 7340, 7341, 7344, 7350, 7353, 7355, 7358, 7360, 7362, 7372, 7374, 7375, 7378, 7381, 7385, 7387, 7390, 7391, 7392, 7394, 7397, 7401, 7402, 7405, 7410, 7413, 7415, 7416, 7417, 7420,

[0349] right Primer: 6984, 6987, 6989, 6990, 6991, 6993, 6996, 6999, 7001, 7003, 7005, 7007, 7009, 7010, 7011, 7012, 7014, 7016, 7018, 7020, 7023, 7025, 7026, 7028, 7029, 7031, 7033, 7034, 7035, 7038, 7039, 7041, 7042, 7043, 7044, 7045, 7046, 7047, 7048, 7049, 7051, 7053, 7054, 7057, 7061, 7062, 7063, 7065, 7066, 7068, 7070, 7071, 7073, 7075, 7078, 7080, 7081, 7082, 7083, 7092, 7093, 7094, 7095, 7098, 7101, 7103, 7105, 7106, 7107, 7108, 7111, 7112, 7116, 7119, 7122, 7125, 7126, 7127, 7128, 7129, 7130, 7132, 7134, 7137, 7141, 7142, 7143, 7147, 7150, 7152, 7154, 7155, 7156, 7157, 7161, 7167, 7170, 7171, 7173, 7174, 7176, 7177, 7179, 7182, 7184, 7188, 7189, 7190, 7191, 7193, 7195, 7196, 7197, 7198, 7200, 7206, 7210, 7211, 7212, 7215, 7217, 7218, 7219, 7222, 7223, 7224, 7225, 7226, 7229, 7231, 7232, 7236, 7240, 7241, 7242, 7244, 7247, 7250, 7253, 7254, 7257, 7258, 7259, 7261, 7262, 7267, 7270, 7271, 7273, 7274, 7275, 7282, 7285, 7289, 7290, 7292, 7293, 7294, 7296, 7297, 7298, 7301, 7304, 7307, 7308, 7312, 7316, 7317, 7318, 7319, 7322, 7326, 7328, 7330, 7333, 7335, 7337, 7342, 7345, 7347, 7348, 7349, 7351, 7354, 7356, 7357, 7359, 7361, 7363, 7364, 7365, 7366, 7367, 7368, 7369, 7370, 7371, 7373, 7376, 7379, 7382, 7383, 7384, 7386, 7388, 7389, 7393, 7395, 7398, 7400, 7403, 7404, 7407, 7408, 7409, 7411, 7419, 7421,

[0350] Detection: 6985, 6988, 6994, 6997, 7000, 7004, 7008, 7015, 7019, 7021, 7069, 7079, 7099, 7104, 7117, 7120, 7145, 7151, 7153, 7162, 7164, 7169, 7201, 7209, 7234, 7238, 7252, 7286, 7288, 7300, 7305, 7313, 7323, 7327, 7338, 7343, 7346, 7352, 7377, 7380, 7396, 7399, 7406, 7412, 7414, 7418,

### SEQ ID NO: 47

[0351] left Primer: 7422, 7425, 7427, 7435, 7438, 7439, 7440, 7442, 7444, 7448, 7449, 7456, 7459, 7462, 7463, 7465, 7466, 7467, 7470, 7471, 7474, 7476, 7477, 7480, 7481, 7485, 7486, 7489, 7490, 7493, 7496, 7500, 7503, 7508, 7512, 7518, 7519, 7520, 7522, 7524, 7525, 7527, 7528, 7529, 7532, 7540, 7542, 7543, 7545, 7549, 7552, 7554,

[0352] right Primer: 7423, 7426, 7428, 7430, 7431, 7432, 7433, 7434, 7436, 7445, 7446, 7447, 7450, 7451, 7452, 7453, 7454, 7455, 7457, 7460, 7464, 7468, 7472, 7475, 7478, 7479, 7482, 7483, 7484, 7487, 7488, 7492, 7494, 7495, 7497, 7498, 7499, 7501, 7505, 7506, 7507, 7509, 7510, 7511, 7513, 7515, 7516, 7517, 7521, 7523, 7526, 7530, 7533, 7534, 7535, 7536, 7537, 7538, 7539, 7541, 7544, 7546, 7547, 7548, 7550,

[0353] Detection: 7424, 7429, 7437, 7441, 7443, 7458, 7461, 7469, 7473, 7491, 7502, 7504, 7514, 7531, 7551, 7553,

### SEQ ID NO: 18

[0354] left Primer: 7555, 7558, 7559, 7560, 7565, 7566, 7567, 7570, 7571, 7573, 7574, 7575, 7576, 7577, 7578, 7579, 7580, 7581, 7582, 7585, 7586, 7587, 7588, 7589, 7590, 7596, 7597, 7598, 7600, 7603, 7606, 7609, 7610, 7615, 7618, 7620, 7621, 7623, 7627, 7629, 7633, 7635, 7636, 7643, 7647, 7651, 7655, 7661, 7666, 7672, 7674, 7676, 7677, 7682, 7683, 7685, 7687, 7689, 7690, 7691, 7694, 7699, 7701, 7702, 7704, 7707, 7709, 7711, 7712, 7713, 7714, 7716, 7718, 7720, 7726, 7728, 7729, 7733, 7734, 7735, 7736, 7738, 7740, 7741, 7744, 7746, 7747, 7748, 7749, 7750, 7751, 7752, 7753, 7754, 7755, 7756, 7758,

[0355] right Primer: 7556, 7561, 7563, 7568, 7583, 7584, 7591, 7593, 7594, 7595, 7599, 7601, 7604, 7607, 7608, 7611, 7613, 7614, 7616, 7617, 7619, 7622, 7624, 7626, 7628, 7631, 7637, 7638, 7639, 7640, 7641, 7642, 7644, 7645, 7646, 7649, 7650, 7652, 7654, 7656, 7657, 7658, 7659, 7660, 7662, 7663, 7665, 7667, 7669, 7670, 7671, 7673, 7675, 7678, 7679, 7680, 7681, 7684, 7686, 7688, 7692, 7695, 7697, 7698, 7700, 7703, 7705, 7708, 7710, 7715, 7717, 7719, 7721, 7722, 7723, 7724, 7725, 7727, 7730, 7731, 7732, 7737, 7739, 7742, 7743, 7745, 7757, 7759, 7760,

[0356] Detection: 7557, 7562, 7564, 7569, 7572, 7592, 7602, 7605, 7612, 7625, 7630, 7632, 7634, 7648, 7653, 7664, 7668, 7693, 7696, 7706,

### SEQ ID NO: 20

[0357] left Primer: 7761, 7764, 7770, 7774, 7775, 7778, 7782, 7786, 7788, 7795, 7797, 7799, 7805, 7807, 7809, 7810, 7811, 7815, 7817, 7819, 7820, 7822, 7823, 7824, 7828, 7832, 7834, 7837, 7839, 7843, 7845, 7851, 7852, 7857, 7860, 7863, 7865, 7868, 7874, 7881, 7885, 7889, 7892, 7894, 7896, 7900, 7902, 7904, 7907, 7909, 7910, 7913, 7917, 7922, 7925, 7926, 7928, 7933, 7934, 7937, 7941, 7945, 7946, 7948, 7950, 7951, 7952, 7953, 7954, 7955, 7956, 7957, 7963, 7964, 7968, 7971, 7972, 7973, 7976, 7979, 7980, 7981, 7982, 7983, 7985, 7986, 7987, 7988, 7991,

[0358] right Primer: 7762, 7765, 7767, 7768, 7771, 7773, 7776, 7779, 7781, 7783, 7784, 7785, 7789, 7791, 7792, 7793, 7794, 7796, 7798, 7800, 7802, 7803, 7808, 7812, 7813, 7814, 7816, 7818, 7821, 7825, 7827, 7829, 7830, 7833, 7835, 7836, 7838, 7840, 7841, 7842, 7844, 7846, 7847, 7848, 7849, 7853, 7854, 7855, 7856, 7858, 7861, 7864, 7866, 7869, 7870, 7871, 7872, 7873, 7875, 7877, 7878, 7879, 7880, 7882, 7884, 7886, 7888, 7890, 7897, 7899, 7903, 7905, 7912, 7914, 7916, 7918, 7919, 7920, 7921, 7923, 7929, 7931, 7932, 7936, 7938, 7939, 7940, 7942, 7943, 7944, 7947, 7949, 7958, 7960, 7962, 7965, 7967, 7969, 7970, 7974, 7977, 7989, 7990,

[0359] Detection: 7763, 7766, 7769, 7772, 7777, 7780, 7787, 7790, 7801, 7804, 7806, 7826, 7831, 7850, 7859, 7862, 7867, 7876, 7883, 7887, 7891, 7893, 7895, 7898, 7901, 7906, 7908, 7911, 7915, 7924, 7927, 7930, 7935, 7959, 7961, 7966, 7975, 7978, 7984,

### SEQ ID NO: 48

[0360] left Primer: 7992, 7995, 7996, 8000, 8003, 8006, 8007, 8010, 8012, 8015, 8016, 8018, 8019, 8026, 8027, 8030, 8034, 8035, 8038, 8039, 8043, 8044, 8046, 8049, 8050, 8052, 8053, 8055, 8056, 8062, 8064, 8066, 8067, 8068, 8069, 8070, 8071, 8074, 8076, 8077, 8078, 8079, 8080, 8081,

[0361] right Primer: 7993, 7997, 7999, 8001, 8004, 8005, 8008, 8009, 8011, 8013, 8017, 8020, 8021, 8022, 8023, 8024, 8025, 8028, 8031, 8033, 8036, 8040, 8042, 8047, 8051, 8054, 8057, 8059, 8060, 8061, 8065, 8072, 8073, 8075, 8082, 8083, 8084, 8085, 8087, 8088, 8089

[0362] Detection: 7994, 7998, 8002, 8014, 8029, 8032, 8037, 8041, 8045, 8048, 8058, 8063, 8086,

### SEQ ID NO:50

[0363] left Primer: 8090, 8093, 8095, 8098, 8100, 8101, 8102, 8104, 8107, 8110, 8111, 8114, 8115, 8116, 8118, 8122, 8124, 8126, 8127, 8129, 8132, 8134, 8136, 8138, 8142, 8143, 8144, 8146, 8151, 8157, 8160, 8163, 8165, 8168, 8169, 8170, 8173, 8174, 8175, 8176, 8178, 8181, 8185, 8187, 8188, 8189, 8190, 8191, 8193, 8194, 8200, 8203, 8206, 8208, 8209, 8212, 8214, 8216, 8217, 8220, 8222, 8224, 8228, 8230,

[0364] right Primer: 8091, 8094, 8096, 8099, 8103, 8105, 8108, 8112, 8113, 8117, 8119, 8121, 8123, 8125, 8128, 8130, 8131, 8133, 8135, 8137, 8139, 8145, 8147, 8148, 8149, 8150, 8152, 8153, 8154, 8155, 8156, 8158, 8161, 8164, 8166, 8167, 8171, 8177, 8179, 8180, 8182, 8183, 8184, 8186, 8192, 8195, 8197, 8198, 8199, 8201, 8202, 8204, 8207, 8210, 8213, 8218, 8221, 8223, 8225, 8227, 8229, 8231,

[0365] Detection: 8092, 8097, 8106, 8109, 8120, 8140, 8141, 8159, 8162, 8172, 8196, 8205, 8211, 8215, 8219, 8226,

### SEQ ID NO:19

[0366] left Primer: 8232, 8235, 8236, 8237, 8238, 8244, 8245, 8247, 8250, 8251, 8253, 8254, 8255, 8256, 8258, 8259, 8260, 8263, 8267, 8269, 8270, 8273, 8274, 8277, 8280, 8281, 8289, 8292, 8293, 8294, 8295, 8296, 8297, 8298, 8301, 8305, 8306, 8310, 8311, 8312, 8315, 8317, 8318, 8322, 8323, 8324, 8327, 8328, 8329, 8330, 8333, 8336, 8339, 8340, 8347, 8349, 8350, 8352, 8353, 8356, 8359, 8360, 8366, 8369, 8370, 8372, 8374, 8376, 8377, 8379, 8381, 8382, 8383,

[0367] right Primer: 8233, 8239, 8240, 8242, 8243, 8246, 8248, 8252, 8257, 8261, 8264, 8266, 8268, 8271, 8275, 8278, 8282, 8284, 8285, 8286, 8287, 8288, 8291, 8299, 8302, 8303, 8304, 8307, 8309, 8313, 8314, 8316, 8319, 8321, 8325, 8326, 8331, 8332, 8334, 8335, 8337, 8341, 8342, 8343, 8344, 8345, 8346, 8348, 8351, 8354, 8357, 8361, 8362, 8363, 8364, 8365, 8367, 8371, 8373, 8375, 8378,

[0368] Detection: 8234, 8241, 8249, 8262, 8265, 8272, 8276, 8279, 8283, 8290, 8300, 8308, 8320, 8338, 8355, 8358, 8368, 8380,

### SEQ ID NO: 17

[0369] left Primer: 8384, 8387, 8390, 8391, 8397, 8398, 8401, 8402, 8405, 8406, 8409, 8414, 8418, 8419, 8422, 8425, 8428, 8431, 8432, 8433, 8435, 8437, 8440, 8444, 8449, 8452, 8454, 8455, 8457, 8462, 8464, 8466, 8468, 8469, 8472, 8475, 8476, 8478, 8479, 8481, 8484, 8487, 8488, 8490, 8493, 8496, 8497, 8498, 8501, 8505, 8508, 8511, 8513, 8515, 8517, 8518, 8519, 8521, 8522, 8523, 8526, 8528, 8530, 8531, 8532, 8534, 8536, 8541, 8544, 8547, 8551, 8554, 8556, 8558, 8560, 8562, 8563, 8566, 8567, 8568, 8570, 8571, 8574, 8575, 8576, 8577, 8580, 8581, 8585, 8588, 8591, 8594, 8601, 8602, 8603, 8608, 8609, 8613, 8614, 8617, 8618, 8619, 8620, 8623, 8624, 8628, 8629, 8630, 8633, 8634, 8635, 8636, 8638, 8643, 8645, 8648, 8654, 8657, 8658, 8659, 8660, 8661, 8662, 8666, 8670, 8672, 8674, 8676, 8681, 8683, 8686, 8688, 8689, 8691, 8692, 8693, 8695, 8696, 8700, 8701, 8702, 8703, 8704, 8705, 8709, 8716, 8717, 8719, 8722, 8725, 8727, 8728, 8729, 8732, 8733, 8734, 8735, 8736,

[0370] right Primer: 8385, 8388, 8392, 8394, 8395, 8399, 8403, 8407, 8410, 8411, 8412, 8413, 8415, 8416, 8420, 8423, 8424, 8426, 8429, 8434, 8436, 8438, 8442, 8445, 8446, 8447, 8448, 8450, 8451, 8456, 8458, 8460, 8461, 8463, 8465, 8467, 8470, 8473, 8474, 8477, 8480, 8482, 8485, 8486, 8489, 8491, 8492, 8494, 8499, 8500, 8502, 8503, 8504, 8506, 8510, 8512, 8514, 8516, 8520, 8524, 8527, 8529, 8533, 8535, 8537, 8539, 8542, 8545, 8546, 8548, 8550, 8552, 8555, 8557, 8564, 8565, 8569, 8572, 8578, 8582, 8583, 8586, 8587, 8589, 8592, 8595, 8596, 8597, 8598, 8599, 8600, 8604, 8606, 8607, 8610, 8612, 8615, 8616, 8621, 8625, 8627, 8631, 8632, 8637, 8639, 8640, 8641, 8642, 8644, 8646, 8647, 8649, 8650, 8651, 8652, 8653, 8655, 8663, 8665, 8667, 8668, 8669, 8671, 8673, 8675, 8677, 8678, 8679, 8680, 8682, 8684, 8685, 8687, 8690, 8694, 8697, 8698, 8699, 8706, 8707, 8708, 8710, 8711, 8712, 8713, 8714, 8715, 8718, 8720, 8723, 8726, 8730, 8737,

[0371] Detection: 8386, 8389, 8393, 8396, 8400, 8404, 8408, 8417, 8421, 8427, 8430, 8439, 8441, 8443, 8453, 8459, 8471, 8483, 8495, 8507, 8509, 8525, 8538, 8540, 8543, 8549, 8553, 8559, 8561, 8573, 8579, 8584, 8590, 8593, 8605, 8611, 8622, 8626, 8656, 8664, 8721, 8724, 8731,

### SEQ ID NO: 23

[0372] left Primer: 8738, 8741, 8744, 8747, 8750, 8751, 8753, 8754, 8755, 8756, 8759, 8760, 8762, 8763, 8766, 8767, 8768, 8769, 8770, 8772, 8775, 8776, 8777, 8779, 8782, 8783, 8784, 8785, 8786, 8787, 8788, 8789, 8790, 8793, 8794, 8796, 8798, 8799, 8801, 8803, 8804, 8806, 8807, 8809, 8812, 8813, 8815, 8820, 8823, 8826, 8829, 8830, 8832, 8835, 8836, 8837, 8842, 8845, 8846, 8847, 8851, 8853, 8856, 8857, 8859, 8861, 8866, 8739, 8878, 8879, 8880, 8884, 8891, 8893, 8895, 8898, 8900, 8901, 8909, 8912,

[0373] right Primer: 8739, 8742, 8745, 8748, 8749, 8752, 8757, 8758, 8761, 8764, 8771, 8773, 8778, 8780, 8791, 8797, 8800, 8802, 8805, 8808, 8810, 8814, 8816, 8818, 8819, 8821, 8824, 8827, 8828, 8831, 8833, 8838, 8840, 8841, 8755, 8843, 8844, 8848, 8850, 8852, 8854, 8855, 8863, 8864, 8865, 8867, 8868, 8869, 8870, 8871, 8872, 8873, 8874, 8876, 8877, 8881, 8882, 8883, 8885, 8887, 8888, 8889, 8890, 8892, 8894, 8896, 8897, 8899, 8902, 8785, 8903, 8904, 8905, 8906, 8907, 8908, 8911,

[0374] Detection: 8740, 8743, 8746, 8765, 8774, 8781, 8792, 8795, 8811, 8817, 8822, 8825, 8834, 8839, 8849, 8858, 8860, 8862, 8875, 8886, 8910,

### SEQ ID NO: 21

[0375] left Primer: 8913, 8917, 8920, 8923, 8924, 8929, 8931, 8934, 8935, 8936,

[0376] right Primer: 8914, 8916, 8918, 8921, 8925, 8927, 8928, 8930, 8932, 8933, 8937,

[0377] Detection: 8915, 8919, 8922, 8926,

### SEQ ID NO: 32

[0378] left Primer: 8938, 8944, 8945, 8948, 8952, 8953, 8954, 8957, 8958, 8961, 8962, 8965, 8967, 8969, 8970, 8971, 8972, 8977,

[0379] right Primer: 8939, 8941, 8942, 8943, 8946, 8949, 8950, 8951, 8955, 8960, 8963, 8964, 8966, 8968, 8974, 8975, 8976, 8978, 8979,

[0380] Detection: 8940, 8947, 8956, 8959, 8973,

### SEQ ID NO: 33

[0381] left Primer: 8980, 8984, 8988, 8989, 8998, 9001, 9002, 9005, 9007, 9008, 9012, 9013, 9016, 9019, 9020, 9022, 9023, 9025, 9028, 9029, 9032, 9033, 9034, 9035, 9037, 9038, 9044, 9046, 9047, 9048, 9049, 9054,

[0382] right Primer: 8981, 8983, 8985, 8987, 8990, 8992, 8993, 8994, 8995, 8997, 8999, 9003, 9004, 9006, 9009, 9010, 9011, 9014, 9017, 9018, 9021, 9024, 9026, 9030, 9036, 9039, 9041, 9042, 9043, 9045, 9050, 9051, 9052, 9053,

[0383] Detection: 8982, 8986, 8991, 8996, 9000, 9015, 9027, 9031, 9040,

### SEQ ID NO: 34

[0384] left Primer: 9055, 9058, 9060, 9063, 9066, 9067, 9068, 9069, 9070, 9071, 9074, 9075, 9077, 9078, 9079, 9080, 9082, 9084, 9088, 9089, 9090, 9099, 9103, 9104, 9105, 9107, 9111,

[0385] right Primer: 9056, 9061, 9064, 9072, 9081, 9083, 9085, 9086, 9087, 9091, 9092, 9093, 9094, 9095, 9096, 9097, 9098, 9100, 9102, 9106, 9108, 9109, 9110, 9112,

[0386] Detection: 9057, 9059, 9062, 9065, 9073, 9076, 9101,

### SEQ ID NO: 24

[0387] left Primer: 9113, 9116, 9118, 9125, 9126, 9128, 9129, 9130, 9136, 9141, 9143, 9148, 9150, 9153, 9157, 9158, 9159, 9163, 9164, 9165, 9167, 9168, 9171, 9173, 9177, 9180, 9181, 9182, 9183, 9185, 9187, 9188, 9189, 9191, 9192, 9193, 9194, 9197, 9198, 9200, 9206, 9207, 9208, 9209, 9211, 9216, 9218, 9219, 9220, 9221, 9222, 9223, 9226, 9228, 9229, 9230, 9231, 9232, 9233, 9234, 9237, 9238, 9240, 9243, 9246, 9248, 9253, 9256, 9257, 9260, 9263, 9264, 9266, 9269, 9271, 9279, 9280, 9281, 9282, 9283, 9284, 9290,

[0388] right Primer: 9114, 9119, 9121, 9122, 9123, 9124, 9127, 9131, 9133, 9134, 9135, 9137, 9138, 9139, 9140, 9142, 9144, 9146, 9147, 9149, 9151, 9152, 9154, 9155, 9156, 9160, 9162, 9166, 9169, 9172, 9174, 9175, 9176, 9178, 9184, 9186, 9190, 9195, 9199, 9201, 9202, 9203, 9204, 9205, 9212, 9214, 9215, 9217, 9224, 9227, 9235, 9239, 9241, 9244, 9247, 9249, 9251, 9252, 9254, 9258, 9261, 9265, 9267, 9270, 9273, 9274, 9275, 9276, 9277, 9278, 9285, 9286, 9287, 9288, 9289, 9291,

[0389] Detection: 9115, 9117, 9120, 9132, 9145, 9161, 9170, 9179, 9196, 9210, 9213, 9225, 9236, 9242, 9245, 9250, 9255, 9259, 9262, 9268, 9272,

### SEQ ID NO: 35

[0390] left Primer: 9292, 9295, 9297, 9300, 9302, 9303, 9304, 9307, 9308, 9310, 9311, 9313, 9319, 9321, 9323, 9324, 9328, 9333, 9334, 9337, 9338, 9339, 9342, 9344, 9348, 9351, 9352, 9354, 9355, 9357, 9360, 9367, 9371, 9374, 9377, 9379, 9383, 9384, 9385, 9388, 9389, 9390, 9393, 9394, 9398, 9401, 9402, 9406, 9408, 9409, 9410, 9413, 9415, 9416, 9417, 9418, 9419, 9421, 9422, 9425, 9429, 9433, 9434, 9435, 9436, 9437, 9439, 9440, 9446, 9452, 9453, 9454, 9455, 9457, 9458, 9459, 9462, 9466, 9467, 9468, 9470, 9474, 9479, 9482, 9487, 9488, 9489, 9492, 9495, 9497, 9499, 9500, 9504, 9505, 9508, 9513, 9514, 9519, 9522, 9523, 9524, 9526, 9528, 9532, 9533, 9534, 9535, 9537, 9538, 9541, 9542, 9543, 9545, 9546, 9548,

[0391] right Primer: 9293, 9296, 9298, 9301, 9305, 9309, 9312, 9314, 9316, 9317, 9318, 9320, 9322, 9325, 9326, 9327, 9329, 9331, 9332, 9335, 9336, 9340, 9345, 9347, 9349, 9353, 9356, 9358, 9361, 9363, 9364, 9365, 9368, 9370, 9372, 9375, 9376, 9378, 9380, 9382, 9386, 9391, 9395, 9397, 9399, 9400, 9403, 9405, 9407, 9411, 9412, 9414, 9420, 9423, 9424, 9426, 9428, 9430, 9431, 9432, 9438, 9441, 9443, 9444, 9445, 9447, 9448, 9449, 9450, 9451, 9456, 9460, 9461, 9464, 9465, 9469, 9471, 9473, 9475, 9477, 9478, 9480, 9483, 9485, 9490, 9493, 9494, 9496, 9498, 9501, 9502, 9503, 9506, 9509, 9511, 9512, 9515, 9516, 9517, 9518, 9520, 9521, 9525, 9527, 9529, 9530, 9536, 9539, 9544, 9547, 9549, 9550,

[0392] Detection: 9294, 9299, 9306, 9315, 9330, 9341, 9343, 9346, 9350, 9359, 9362, 9366, 9369, 9373, 9381, 9387, 9392, 9396, 9404, 9427, 9442, 9463, 9472, 9476, 9481, 9484, 9486, 9491, 9507, 9510, 9531, 9540,

### SEQ ID NO: 25

[0393] left Primer: 9551, 9555, 9556, 9557, 9559, 9560, 9563, 9564, 9565, 9566, 9569, 9570, 9573, 9577, 9578, 9579, 9580, 9585, 9586, 9587, 9588, 9591, 9593, 9596,

[0394] right Primer: 9552, 9554, 9558, 9561, 9567, 9571, 9574, 9576, 9581, 9583, 9584, 9589, 9592, 9594, 9595,

[0395] Detection: 9553, 9562, 9568, 9572, 9575, 9582, 9590, 9597,

### SEQ ID NO:36

[0396] left Primer: 9598, 9602, 9604, 9605, 9608, 9612, 9613, 9614, 9617, 9618, 9621, 9622, 9625, 9626, 9627, 9632, 9633, 9638, 9640, 9643, 9644, 9645, 9646, 9651, 9654, 9656, 9657, 9658, 9661, 9662, 9665, 9666, 9667, 9668, 9672, 9673, 9675, 9676, 9677, 9680, 9683, 9686, 9688, 9691, 9694, 9698, 9699, 9702, 9705, 9707, 9710, 9711, 9715, 9719, 9720, 9722, 9723, 9726, 9729, 9732, 9733, 9735, 9737, 9738, 9741, 9744, 9745, 9746, 9747, 9748, 9749, 9750, 9754, 9755, 9756, 9758, 9759, 9768, 9771, 9772, 9776, 9777, 9781, 9782, 9784, 9787, 9789, 9790, 9792, 9796, 9797, 9800, 9805, 9806, 9812, 9815, 9818, 9821, 9823, 9825, 9827, 9831, 9832, 9835, 9837, 9839, 9841, 9842, 9844, 9845, 9851, 9853, 9854, 9855, 9857, 9860, 9862, 9863, 9865, 9871, 9873, 9875, 9878, 9879,

[0397] right Primer: 9599, 9601, 9603, 9606, 9607, 9609, 9611, 9615, 9619, 9623, 9624, 9628, 9630, 9631, 9634, 9635, 9637, 9639, 9641, 9647, 9649, 9650, 9652, 9653, 9659, 9660, 9663, 9664, 9670, 9671, 9679, 9682, 9684, 9687, 9690, 9692, 9693, 9695, 9697, 9700, 9701, 9703, 9706, 9708, 9712, 9713, 9714, 9716, 9717, 9718, 9721, 9724, 9727, 9730, 9734, 9739, 9742, 9751, 9753, 9757, 9760, 9761, 9762, 9763, 9764, 9765, 9766, 9767, 9769, 9773, 9775, 9778, 9780, 9783, 9786, 9788, 9791, 9793, 9794, 9795, 9798, 9801, 9803, 9804, 9807, 9808, 9809, 9810, 9811, 9813, 9816, 9817, 9819, 9820, 9822, 9826, 9828, 9830, 9833, 9836, 9838, 9840, 9843, 9846, 9847, 9848, 9849, 9850, 9852, 9856, 9858, 9859, 9861, 9864, 9866, 9867, 9868, 9869, 9870, 9872, 9876, 9877, 9880, 9881,

[0398] Detection: 9600, 9610, 9616, 9620, 9629, 9636, 9642, 9648, 9655, 9669, 9674, 9678, 9681, 9685, 9689, 9696, 9704, 9709, 9725, 9728, 9731, 9736, 9740, 9743, 9752, 9770, 9774, 9779, 9785, 9799, 9802, 9814, 9824, 9829, 9834, 9874,

### SEQ ID NO: 28

[0399] left Primer: 9882, 9886, 9890, 9891, 9894, 9900, 9902, 9904, 9908, 9911, 9912, 9915, 9917, 9919, 9923, 9925, 9928, 9935, 9936, 9940, 9943, 9949, 9953, 9954, 9956, 9957, 9958, 9962, 9963, 9964, 9968, 9969, 9975, 9978, 9981, 9988, 9989, 9990, 9991, 9992, 9995, 9997, 10011, 10012, 10014, 10017, 10018, 10031, 10032, 10033, 10034, 10035, 10037, 10041, 10042, 10046, 10050, 10054, 10058, 10059,

[0400] right Primer: 9883, 9885, 9887, 9889, 9892, 9893, 9895, 9896, 9897, 9898, 9899, 9901, 9903, 9905, 9907, 9909, 9913, 9914, 9916, 9918, 9920, 9921, 9922, 9924, 9926, 9929, 9931, 9932, 9933, 9934, 9937, 9938, 9939, 9941, 9942, 9944, 9945, 9946, 9947, 9948, 9950, 9952, 9955, 9959, 9960, 9961, 9966, 9967, 9970, 9972, 9973, 9974, 9976, 9979, 9980, 9982, 9983, 9984, 9985, 9986, 9987, 9993, 9994, 9996, 9998, 9999, 10000, 10001, 10002, 10003, 10004, 10005, 10006, 10007, 10008, 10009, 10010, 10013, 10015, 10016, 10019, 10020, 10021, 10022, 10023, 10025, 10026, 10027, 10028, 10030, 10036, 10038, 10040, 10043, 10044, 10045, 10047, 10048, 10049, 10051, 10053, 10055, 10056, 10057, 10060,

[0401] Detection: 9884, 9888, 9906, 9910, 9927, 9930, 9951, 9965, 9971, 9977, 10024, 10029, 10039, 10052,

### SEQ ID NO: 37

[0402] left Primer: 10061, 10064, 10067, 10068, 10070, 10071, 10072, 10074, 10079, 10081, 10083, 10088, 10091, 10095, 10096, 10097, 10101, 10103, 10105, 10106, 10109, 10110, 10111, 10113, 10116, 10118, 10120, 10122, 10125, 10126, 10127, 10131, 10134, 10137, 10138, 10144, 10147, 10149, 10151, 10152, 10155, 10156, 10159, 10160, 10169, 10172, 10174, 10175, 10178, 10181, 10186, 10188, 10189, 10190, 10191, 10192, 10196, 10199, 10203, 10204, 10210, 10211, 10216, 10218, 10221, 10224, 10225, 10226, 10229, 10230, 10231, 10232, 10234, 10239, 10241, 10244, 10252, 10253, 10257, 10258, 10259, 10261, 10266, 10272, 10276,

[0403] right Primer: 10062, 10065, 10069, 10075, 10077, 10078, 10080, 10082, 10084, 10086, 10087, 10089, 10090, 10092, 10093, 10094, 10098, 10099, 10100, 10102, 10104, 10107, 10112, 10114, 10117, 10119, 10121, 10123, 10124, 10129, 10130, 10132, 10133, 10135, 10139, 10140, 10141, 10142, 10143, 10145, 10148, 10150, 10153, 10154, 10157, 10161, 10163, 10164, 10165, 10166, 10167, 10170, 10173, 10176, 10177, 10179, 10182, 10183, 10184, 10187, 10193, 10194, 10195, 10197, 10198, 10200, 10201, 10202, 10205, 10206, 10207, 10209, 10212, 10213, 10214, 10215, 10219, 10220, 10222, 10223, 10227, 10228, 10233, 10235, 10236, 10237, 10240, 10242, 10243, 10245, 10247, 10248, 10249, 10251, 10254, 10255, 10256, 10260, 10262, 10263, 10264, 10265, 10267, 10268, 10269, 10270, 10271, 10273, 10274, 10275, 10277, 10278,

[0404] Detection: 10063, 10066, 10073, 10076, 10085, 10108, 10115, 10128, 10136, 10146, 10158, 10162, 10168, 10171, 10180, 10185, 10208, 10217, 10238, 10246, 10250,

### SEQ ID NO: 26

[0405] left Primer: 10279, 10282, 10285, 10287, 10291, 10292, 10297, 10299, 10301, 10304, 10306, 10308, 10310, 10314, 10317, 10318, 10320, 10322, 10327, 10329, 10330, 10333, 10335, 10336, 10337, 10340, 10342, 10348, 10350, 10351, 10354, 10358, 10359, 10360, 10362, 10366, 10369, 10372, 10373, 10374, 10376, 10378, 10383, 10385, 10391, 10398, 10403, 10407, 10410, 10413, 10415, 10419, 10422, 10425, 10427, 10428, 10429, 10430, 10432, 10433, 10434, 10437, 10438, 10439, 10442, 10443, 10445, 10446, 10447, 10448, 10452, 10453, 10454, 10455, 10456, 10460, 10463, 10466, 10467, 10469, 10470, 10473, 10475, 10477, 10480, 10484, 10488, 10490, 10494, 10495, 10497, 10501, 10502, 10503, 10507, 10508, 10510, 10517, 10518, 10520, 10522, 10524, 10525, 10528, 10529, 10533, 10536, 10537, 10540, 10541, 10545, 10547, 10551, 10553, 10556, 10559, 10560, 10563, 10564, 10565, 10568, 10571, 10574, 10576, 10579, 10581, 10583, 10588, 10589, 10590, 10592, 10593, 10596, 10597, 10601, 10602, 10603, 10605, 10607, 10609, 10610, 10612, 10613, 10617, 10618, 10621, 10624, 10627, 10630, 10632, 10634, 10637, 10638, 10639, 10640, 10641, 10643, 10645, 10647, 10653, 10655, 10657, 10659, 10661, 10662, 10663, 10664, 10665, 10666, 10667, 10668, 10669, 10672, 10673, 10674, 10675,

[0406] right Primer: 10280, 10283, 10286, 10288, 10290, 10293, 10295, 10298, 10300, 10302, 10305, 10307, 10309, 10311, 10312, 10313, 10315, 10319, 10321, 10323, 10325, 10326, 10328, 10331, 10338, 10341, 10343, 10344, 10345, 10346, 10347, 10349, 10352, 10355, 10356, 10357, 10361, 10363, 10365, 10367, 10370, 10375, 10377, 10379, 10380, 10381, 10382, 10384, 10386, 10387, 10388, 10390, 10392, 10394, 10395, 10399, 10401, 10402, 10404, 10406, 10408, 10411, 10412, 10414, 10416, 10417, 10418, 10420, 10423, 10426, 10431, 10435, 10440, 10444, 10449, 10451, 10457, 10459, 10461, 10462, 10464, 10465, 10468, 10471, 10476, 10478, 10481, 10483, 10485, 10487, 10489, 10491, 10492, 10493, 10498, 10499, 10500, 10504, 10506, 10509, 10511, 10513, 10514, 10515, 10516, 10519, 10521, 10523, 10526, 10530, 10531, 10532, 10534, 10535, 10538, 10539, 10542, 10543, 10544, 10546, 10548, 10550, 10552, 10554, 10557, 10558, 10561, 10566, 10569, 10572, 10573, 10577, 10578, 10580, 10582, 10584, 10586, 10594, 10598, 10600, 10604, 10606, 10611, 10614, 10616, 10619, 10622, 10625, 10626, 10628, 10631, 10633, 10635, 10642, 10644, 10646, 10648, 10649, 10650, 10651, 10652, 10654, 10656, 10658, 10660, 10670, 10671, 10676,

[0407] Detection: 10281, 10284, 10289, 10294, 10296, 10303, 10316, 10324, 10332, 10334, 10339, 10353, 10364, 10368, 10371, 10389, 10393, 10396, 10397, 10400, 10405, 10409, 10421, 10424, 10436, 10441, 10450, 10458, 10472, 10474, 10479, 10482, 10486, 10496, 10505, 10512, 10527, 10549, 10555, 10562, 10567, 10570, 10575, 10585, 10587, 10591, 10595, 10599, 10608, 10615, 10620, 10623, 10629, 10636, 10677,

### SEQ ID NO: 38

[0408] left Primer: 10678, 10684,

[0409] right Primer: 10679, 10681, 10682, 10683, 10685, 10687, 10688, 10689,

[0410] Detection: 10680, 10686,

### SEQ ID NO: 39

[0411] left Primer: 10690,

[0412] right Primer: 10691,

[0413] Detection: 10692,

### SEQ ID NO: 27

[0414] left Primer: 10693, 10696, 10699, 10703, 10704, 10709, 10711, 10712, 10713, 10720, 10721, 10722, 10724, 10725, 10726, 10728, 10729, 10734, 10740, 10742, 10743, 10744, 10745, 10746, 10748, 10749, 10751, 10754, 10758, 10759, 10760, 10764, 10768, 10769, 10772, 10775, 10780, 10781, 10783, 10786, 10791, 10796, 10801, 10808, 10817, 10818, 10819, 10821, 10823, 10826, 10827, 10829, 10830, 10834, 10843, 10844, 10847, 10848, 10849, 10853, 10856, 10858, 10866, 10869, 10872, 10874, 10877, 10878, 10879, 10882, 10884, 10885, 10889, 10892, 10893, 10896, 10900, 10901, 10903, 10905, 10907, 10909, 10910, 10911, 10914, 10916, 10919, 10926, 10930, 10932, 10933, 10934, 10938, 10941, 10942, 10943, 10944, 10946, 10947, 10953, 10955, 10956, 10958, 10959, 10962, 10967, 10968, 10972, 10975, 10977, 10978, 10981, 10984, 10985, 10988, 10992, 10995, 10997, 10999, 11000, 11001, 11006, 11009, 11013, 11016, 11020, 11025, 11033, 11036, 11040, 11041, 11042, 11043, 11045, 11046, 11048, 11052, 11055, 11060, 11061, 11062, 11064, 11065, 11067, 11070, 11071, 11072, 11078, 11079, 11081, 11085, 11093,

[0415] right Primer: 10694, 10697, 10700, 10702, 10705, 10707, 10710, 10714, 10716, 10717, 10718, 10719, 10723, 10727, 10730, 10732, 10733, 10735, 10737, 10738, 10739, 10741, 10747, 10750, 10752, 10755, 10757, 10761, 10762, 0.10763, 10765, 10767, 10770, 10773, 10776, 10778, 10779, 10782, 10784, 10788, 10789, 10790, 10792, 10793, 10794, 10798, 10799, 10800, 10802, 10804, 10805, 10806, 10807, 10809, 10811, 10812, 10813, 10814, 10815, 10816, 10820, 10822, 10824, 10831, 10833, 10835, 10837, 10838, 10839, 10840, 10841, 10842, 10845, 10846, 10850, 10851, 10854, 10857, 10859, 10860, 10861, 10862, 10863, 10864, 10865, 10868, 10870, 10871, 10873, 10875, 10880, 10881, 10883, 10886, 10888, 10890, 10894, 10897, 10899, 10902, 10904, 10906, 10908, 10912, 10915, 10917, 10920, 10922, 10924, 10925, 10927, 10928, 10929, 10931, 10935, 10937, 10939, 10945, 10948, 10950, 10951, 10952, 10954, 10957, 10960, 10963, 10965, 10966, 10969, 10970, 10971, 10973, 10976, 10979, 10980, 10982, 10986, 10987, 10989, 10991, 10993, 10996, 10998, 11002, 11004, 11005, 11007, 11010, 11012, 11014, 11015, 11017, 11019, 11021, 11022, 11023, 11026, 11027, 11028, 11029, 11030, 11031, 11032, 11034, 11037, 11039, 11044, 11047, 11049, 11050, 11051, 11053, 11054, 11056, 11058, 11059, 11063, 11066, 11068, 11069, 11073, 11074, 11075, 11076, 11077, 11080, 11082, 11083, 11084, 11086, 11087, 11088, 11089, 11090, 11091, 11092, 11094,

[0416] Detection: 10695, 10698, 10701, 10706, 10708, 10715, 10731, 10736, 10753, 10756, 10766, 10771, 10774, 10777, 10785, 10787, 10795, 10797, 10803, 10810, 10825, 10828, 10832, 10836, 10852, 10855, 10867, 10876, 10887, 10891, 10895, 10898, 10913, 10918, 10921, 10923, 10936, 10940, 10949, 10961, 10964, 10974, 10983, 10990, 10994, 11003, 11008, 11011, 11018, 11024, 11035, 11038, 11057, 11095,

### SEQ ID NO: 40

[0417] left Primer: 11376, 11381, 11382, 11383, 11384, 11387, 11397, 11401, 11405, 11408, 11414, 11418, 11421, 11422, 11424, 11427, 11429, 11430,

[0418] right Primer: 11377, 11379, 11380, 11385, 11386, 11388, 11390, 11391, 11392, 11394, 11395, 11396, 11398, 11399, 11400, 11402, 11403, 11404, 11406, 11409, 11410, 11411, 11412, 11415, 11416, 11417, 11419, 11423, 11425, 11428, 11431, 11432, 11433,

[0419] Detection: 11378, 11389, 11393, 11407, 11413, 11420, 11426,

### Light Cycler Dual Probe Assays:

### SEQ ID NO: 41

[0420] left Primer: 11434, 11438, 11442, 11443, 11447, 11449, 11450, 11452, 11456, 11459, 11463, 11464, 11467, 11468, 11472, 11477, 11480, 11481, 11482, 11483, 11484, 11488, 11489, 11493, 11498, 11502, 11504, 11505, 11506, 11507, 11508, 11509, 11512, 11513, 11514, 11517, 11520, 11522, 11523, 11524, 11526, 11528, 11532, 11534,

[0421] right Primer: 11435, 11439, 11444, 11445, 11446, 11448, 11451, 11453, 11457, 11458, 11460, 11461, 11462, 11465, 11466, 11469, 11473, 11474, 11475, 11476, 11478, 11479, 11485, 11486, 11487, 11490, 11494, 11497, 11499, 11500, 11501, 11503, 11510, 11511, 11515, 11518, 11519, 11521, 11525, 11527, 11529,

[0422] Detection: 11436, 11440, 11454, 11470, 11491, 11495, 11530,

[0423] Anchor: 11437, 11441, 11455, 11471, 11492, 11496, 11516, 11531, 11533,

### SEQ ID NO: 5

[0424] left Primer: 11535, 11539, 11540, 11541, 11548, 11550, 11551, 11552, 11555, 11556, 11557, 11560, 11561, 11562, 11568, 11569, 11571, 11572, 11573, 11577,

[0425] right Primer: 11536, 11542, 11545, 11546, 11547, 11549, 11553, 11554, 11563, 11566, 11570, 11574,

[0426] Detection: 11537, 11543, 11558, 11564, 11575,

[0427] Anchor: 11538, 11544, 11559, 11565, 11567, 11576,

### SEQ ID NO: 6

[0428] left Primer: 11578, 11585, 11586, 11590, 11591, 11592, 11595, 11596, 11597; 11600,

[0429] right Primer: 11579, 11582, 11587, 11593, 11594, 11598, 11601,

[0430] Detection: 11580, 11583, 11588,

[0431] Anchor: 11581, 11584, 11589, 11599,

### SEQ ID NO: 8

[0432] left Primer: 11602, 11606, 11607, 11608, 11609, 11616, 11618, 11622, 11626, 11628, 11632, 11633,

[0433] right Primer: 11603, 11610, 11613, 11614, 11615, 11617, 11619, 11623, 11627, 11629, 11634,

[0434] Detection: 11604, 11611, 11620, 11624, 11630,

[0435] Anchor: 11605, 11612, 11621, 11625, 11631,

### SEQ ID NO: 16

[0436] left Primer: 11635, 11640, 11641, 11642, 11643, 11647, 11648, 11654, 11655, 11656, 11657, 11658,

[0437] right Primer: 11636, 11639, 11644, 11645, 11646, 11649, 11652, 11653,

[0438] Detection: 11637, 11650,

[0439] Anchor: 11638, 11651, 132

### SEQ ID NO: 42

[0440] left Primer: 11659, 11663, 11664, 11665, 11666, 11670, 11671, 11672, 11673, 11677, 11681, 11687, 11690, 11694, 11696, 11697, 11701, 11705, 11709, 11713, 11719, 11723, 11729, 11733, 11739, 11744, 11745, 11748, 11749, 11751, 11755, 11759, 11763, 11770, 11772, 11774, 11776, 11778, 11782, 11785,

[0441] right Primer: 11660, 11667, 11674, 11675, 11676, 11678, 11682, 11685, 11686, 11688, 11689, 11691, 11692, 11693, 11695, 11698, 11699, 11700, 11702, 11706, 11710, 11716, 11720, 11724, 11725, 11727, 11728, 11730, 11731, 11732, 11734, 11735, 11736, 11737, 11738, 11740, 11743, 11746, 11747, 11750, 11752, 11756, 11761, 11762, 11764, 11765, 11767, 11768, 11769, 11773, 11775, 11777, 11779, 11783, 11784,

[0442] Detection: 11661, 11668, 11679, 11683, 11703, 11707, 11711, 11714, 11717, 11721, 11726, 11741, 11753, 11757, 11766, 11771, 11780,

[0443] Anchor: 11662, 11669, 11680, 11684, 11704, 11708, 11712, 11715, 11718, 11722, 11742, 11754, 11758, 11760, 11781,

### SEQ ID NO: 14

[0444] left Primer: 11786, 11790, 11791, 11792,

[0445] right Primer: 11787, 11793,

[0446] Detection: 11788, 11794,

[0447] Anchor: 11789, 11795,

### SEQ ID NO: 43

[0448] left Primer: 11796, 11800, 11802, 11803, 11805, 11810, 11818, 11819, 11823, 11824, 11827, 11828, 11829, 11833, 11836, 11837, 11839, 11840, 11847, 11850, 11852, 11857, 11860, 11864, 11866,

[0449] right Primer: 11797, 11801, 11804, 11806, 11809, 11811, 11814, 11815, 11817, 11820, 11825, 11830, 11835, 11841, 11844, 11845, 11846, 11848, 11851, 11853, 11856, 11858, 11861, 11862, 11863, 11865,

[0450] Detection: 11798, 11807, 11812, 11816, 11821, 11831, 11842, 11854,

[0451] Anchor: 11799, 11808, 11813, 11822, 11826, 11832, 11834, 11838, 11843, 11849, 11855, 11859,

### SEQ ID NO: 15

[0452] left Primer: 11867, 11871, 11876, 11878, 11882, 11888, 11891, 11894,

[0453] right Primer: 11868, 11872, 11875, 11877, 11879, 11883, 11886, 11887, 11889, 11890, 11892, 11893, 11895,

[0454] Detection: 11869, 11873, 11880, 11884, 11896,

[0455] Anchor: 11870, 11874, 11881, 11885, 11897,

### SEQ ID NO:4

[0456] left Primer: 11898, 11902, 11903, 11904, 11908, 11909, 11911, 11912, 11913, 11914, 11915, 11917, 11918, 11922, 11926, 11927, 11930, 11932, 11933, 11937, 11941, 11942, 11946, 11947, 11948, 11949, 11950, 11951, 11952, 11955, 11959, 11968, 11972, 11976, 11978, 11979, 11980, 11981, 11986, 11988, 11989, 11991, 11992, 11995, 11997, 11998, 12001, 12002, 12004, 12005,

[0457] right Primer: 11899, 11905, 11910, 11916, 11919, 11923, 11924, 11925, 11928, 11929, 11931, 11934, 11938, 11943, 11953, 11954, 11956, 11960, 11963, 11964, 11967, 11969, 11973, 11977, 11982,11985, 11987, 11990, 11993, 11994, 11996, 11999, 12000, 12003,

[0458] Detection: 11900, 11906, 11920, 11935, 11939, 11944, 11957, 11961, 11965, 11970, 11974, 11983,

[0459] Anchor: 11901, 11907, 11921, 11936, 11940, 11945, 11958, 11962, 11966, 11971, 11975, 11984,

### SEQ ID NO: 7

[0460] left Primer: 12006, 12011, 12015, 12016, 12017, 12021, 12022, 12023, 12024, 12025, 12026, 12027, 12031, 12034, 12042, 12043, 12045, 12049, 12050, 12051, 12054, 12062, 12063, 12064, 12066, 12067, 12068, 12070, 12072, 12076, 12082, 12085, 12086, 12089, 12090, 12093, 12094, 12095, 12096, 12097, 12098, 12101, 12103, 12107, 12108, 12111, 12112, 12114, 12118, 12119, 12120, 12128,

[0461] right Primer: 12007, 12010, 12012, 12020, 12028, 12032, 12033, 12035, 12038, 12039, 12044, 12046, 12052, 12055, 12056, 12057, 12058, 12059, 12060, 12061, 12065, 12069, 12071, 12073, 12077, 12080, 12081, 12084, 12087, 12088, 12091, 12099, 12100, 12102, 12104, 12109, 12110, 12113, 12115, 12121, 12122, 12123, 12124, 12125, 12127, 12129,

[0462] Detection: 12008, 12013, 12018, 12029, 12036, 12040, 12047, 12074, 12078, 12083, 12105, 12116,

[0463] Anchor: 12009, 12014, 12019, 12030, 12037, 12041, 12048, 12053, 12075, 12079, 12036, 12092, 12106, 12117, 12126,

### SEQ ID NO:1

[0464] left Primer: 12130, 12135, 12136, 12141, 12144, 12147, 12148, 12149, 12153, 12159, 12160,

[0465] right Primer: 12131, 12134, 12137, 12138, 12139, 12140, 12142, 12143, 12145, 12146, 12150, 12154, 12157, 12158, 12161, 12162, 12163,

[0466] Detection: 12132, 12151, 12155,

[0467] Anchor: 12133, 12152, 12156,

### SEQ ID NO: 45

[0468] left Primer: 12164, 12168, 12171, 12176, 12181, 12187, 12190, 12194, 12196, 12197, 12199, 12201, 12202, 12209, 12213, 12216, 12220, 12221, 12223, 12225, 12226, 12231, 12233, 12239, 12243, 12244, 12250, 12254, 12256, 12257, 12259, 12266, 12270, 12271, 12272, 12274, 12276, 12277, 12278, 12280, 12284, 12285, 12288, 12289, 12290, 12291, 12295, 12296, 12302, 12308, 12313, 12317, 12321, 12322, 12323, 12324, 12325, 12327, 12328, 12330, 12331, 12332, 12336, 12337, 12339, 12343, 12346, 12349, 12353, 12354, 12355, 12359, 12361, 12363, 12367, 12369, 12370, 12372, 12376, 12377, 12379, 12380, 12381, 12382, 12383, 12385, 12389, 12393, 12398, 12400, 12402, 12403, 12406, 12408, 12409, 12410, 12412, 12415, 12417, 12419, 12422, 12424, 12429, 12430, 12432, 12433, 12435, 12436, 12437, 12441, 12445, 12448, 12449, 12454, 12458, 12459, 12460,

[0469] right Primer: 12165, 12169, 12170, 12172, 12175, 12177, 12180, 12182, 12185, 12186, 12188, 12191, 12195, 12198, 12200, 12203, 12206, 12207, 12208, 12210, 12214, 12217, 12222, 12224, 12227, 12228, 12229, 12230, 12232, 12234, 12237, 12238, 12240, 12241, 12242, 12245, 12248, 12249, 12251, 12255, 12258, 12260, 12262, 12263, 12264, 12265, 12267, 12268, 12269, 12273, 12279, 12281, 12286, 12287, 12292, 12297, 12300, 12303, 12306, 12307, 12309, 12312, 12314, 12318, 12326, 12333, 12338, 12340, 12341, 12342,12345, 12347, 12348, 12352,12356, 12360, 12362, 12364, 12371, 12373, 12378, 12386, 12390, 12394, 12397, 12401, 12404, 12405, 12411, 12413, 12418, 12420, 12423, 12425, 12428, 12438, 12439, 12440, 12442, 12443, 12446, 12450, 12453, 12455,

[0470] Detection: 12166, 12173, 12178, 12183, 12189, 12192, 12204, 12211, 12218, 12235, 12246, 12252, 12282, 12293, 12298, 12301, 12304, 12310, 12315, 12319, 12334, 12350, 12357, 12365, 12374, 12387, 12391, 12395, 12416, 12426, 12444, 12451, 12456,

[0471] Anchor: 12167, 12174, 12179, 12184, 12193, 12205, 12212, 12215, 12219, 12236, 12247, 12253, 12261, 12275, 12283, 12294, 12299, 12305, 12311, 12316, 12320, 12329, 12335, 12344, 12351, 12358, 12366, 12368, 12375, 12384, 12388, 12392, 12396, 12399, 12407, 12414, 12421, 12427, 12431, 12434, 12447, 12452,12457,

### SEQ ID NO: 9

[0472] left Primer: 12461, 12465, 12467, 12468, 12472, 12474, 12477, 12480, 12484, 12486, 12488, 12489, 12490, 12493, 12495, 12499, 12501, 12504, 12506,

[0473] right Primer: 12462, 12469, 12475, 12478, 12481, 12483, 12485, 12487, 12492, 12494, 12496, 12497, 12498, 12500, 12502, 12505,

[0474] Detection: 12463, 12470, 12473, 12482,

[0475] Anchor: 12464, 12466, 12471, 12476, 12479, 12491, 12503,

### SEQ ID NO: 46

[0476] left Primer: 12507, 12511, 12517, 12520, 12522, 12523, 12524, 12528, 12530, 12534, 12535, 12536, 12537, 12541, 12542, 12547, 12550, 12551, 12552, 12554, 12555, 12560, 12564, 12565, 12569, 12571, 12574, 12579, 12581, 12586, 12590, 12592, 12593, 12594, 12596, 12600, 12601, 12602, 12604, 12610, 12613, 12614, 12615, 12616, 12620, 12626, 12630,

[0477] right Primer: 12508, 12512, 12515, 12518, 12521, 12525, 12529, 12531, 12538, 12543, 12546, 12548, 12549, 12553, 12556, 12559, 12561, 12566, 12570, 12572, 12573, 12575, 12578, 12582, 12585, 12587, 12595, 12597, 12599, 12603, 12605, 12608, 12609, 12611, 12617, 12618, 12621, 12624, 12625, 12627,

[0478] Detection: 12509, 12513, 12516, 12514, 12532, 12539, 12544, 12557, 12562, 12567, 12576, 12583, 12588, 12591, 12606, 12612, 12622, 12628,

[0479] Anchor: 12510, 12514, 12519, 12526, 12527, 12533, 12540, 12545, 12558, 12563, 12568, 12577, 12580, 12584, 12589, 12598, 12607, 12619, 12623, 12629,

### SEQ ID NO: 10

[0480] left Primer: 12631, 12636, 12637, 12638, 12639, 12643, 12647, 12648, 12652, 12654, 12660, 12664, 12666, 12670, 12672, 12675, 12677, 12680, 12686, 12691, 12692, 12695, 12699, 12700, 12701, 12703, 12705, 12709, 12710, 12714, 12715, 12716, 12718, 12719, 12720, 12724, 12725, 12728, 12732, 12738, 12739, 12743, 12744, 12745, 12747, 12748, 12752, 12757, 12763, 12764, 12766, 12767, 12768, 12771, 12776, 12777, 12781, 12785, 12787, 12788, 12791, 12792, 12796, 12797, 12800, 12804, 12808, 12813, 12815, 12816, 12817, 12822, 12825, 12828, 12831, 12833, 12834, 12837, 12839, 12841, 12842,

[0481] right Primer: 12632, 12635, 12640, 12641, 12644, 12649, 12653, 12655, 12658, 12661, 12662, 12663, 12665, 12667, 12671, 12673, 12678, 12679, 12681, 12682, 12683, 12684, 12685, 12687, 12688, 12689, 12690, 12693, 12694, 12696, 12702, 12704, 12706, 12712, 12713, 12717, 12721, 12726, 12729, 12730, 12731, 12733, 12736, 12737, 12740, 12746, 12749, 12750, 12751, 12753, 12754, 12755, 12756, 12758, 12760, 12761, 12762, 12765, 12769, 12770, 12772, 12775, 12778, 12782, 12786, 12789, 12790, 12793, 12794, 12795, 12798, 12799, 12801, 12805, 12809, 12812, 12814, 12818, 12821, 12823, 12824, 12826, 12827, 12832, 12835, 12836, 12838, 12840, 12843, 12844,

[0482] Detection: 12633, 12642, 12645, 12650, 12656, 12668, 12674, 12676, 12697, 12707, 12722, 12734, 12741, 12759, 12773, 12779, 12783, 12802, 12806, 12810, 12819, 12829,

[0483] Anchor: 12634, 12646, 12651, 12657, 12659, 12669, 12698, 12708, 12711, 12723, 12707, 12727, 12735, 12742, 12774, 12780, 12784, 12803, 12807, 12811, 12820, 12830,

### SEQ ID NO: 11

[0484] left Primer: 12845, 12849, 12850, 12854, 12857, 12862, 12866, 12867, 12868, 12870, 12872, 12880, 12881, 12884, 12885, 12889, 12890, 12892, 12896, 12898, 12899, 12903, 12907, 12910, 12913, 12919, 12920, 12921, 12923, 12928, 12932, 12938, 12942, 12945, 12948, 12950, 12951, 12953, 12959,

[0485] right Primer: 12846, 12851, 12855, 12858, 12861, 12863, 12869, 12871, 12873, 12876, 12877, 12878, 12879, 12882, 12883, 12886, 12887, 12888, 12891, 12893, 12894, 12895, 12900, 12901, 12902, 12904, 12908, 12909, 12911, 12912, 12914, 12917, 12918, 12924, 12927, 12929, 12933, 12936, 12937, 12939, 12943, 12949, 12954, 12957, 12958, 12960,

[0486] Detection: 12847, 12852, 12859, 12864, 12874, 12905, 12915, 12925, 12930, 12934, 12940, 12944, 12946, 12955,

[0487] Anchor: 12848, 12853, 12856, 12860, 12865, 12875, 12897, 12906, 12916, 12922, 12926, 12931, 12935, 12941, 12930, 12947, 12952, 12956,

### SEQ ID NO: 12

[0488] left Primer: 12961, 12965, 12969, 12975, 12977,

[0489] right Primer: 12962, 12966, 12967, 12968, 12970, 12971, 12972, 12973, 12974, 12976, 12978, 12981,

[0490] Detection: 12963, 12979,

[0491] Anchor: 12964, 12980,

### SEQ ID NO: 13

[0492] left Primer: 12982, 12986, 12989, 12991, 12992, 12993, 12995, 12999, 13001,

[0493] right Primer: 12983, 12987, 12996, 12997, 12998, 13000, 13002,

[0494] Detection: 12984, 13003,

[0495] Anchor: 12985, 12988, 12990, 12994, 13004,

### SEQ ID NO:3

[0496] left Primer: 13005, 13009, 13013, 13017, 13019, 13025, 13029, 13030, 13032, 13033, 13034, 13037, 13040, 13042, 13043, 13044, 13048, 13049, 13051, 13052, 13053, 13057, 13062, 13064, 13065, 13066, 13067, 13072, 13073, 13076, 13078, 13082, 13083, 13085, 13087, 13088, 13089, 13092, 13096, 13100, 13101, 13102, 13105, 13108, 13109, 13110, 13114, 13117, 13118, 13124, 13129, 13131, 13132, 13138, 13144, 13146, 13147, 13148, 13152, 13156, 13159, 13164, 13167, 13168, 13170, 13171, 13172, 13173, 13174, 13184, 13185,

[0497] right Primer: 13006, 13010, 13014, 13018, 13020, 13021, 13022, 13023, 13024, 13026, 13031, 13035, 13036, 13038, 13039, 13041, 13045, 13050, 13054, 13058, 13061, 13063, 13068, 13069, 13070, 13071, 13074, 13075, 13077, 13079, 13084, 13086, 13090, 13091, 13093, 13097, 13104, 13107, 13111, 13115, 13119, 13121, 13122, 13123, 13125, 13126, 13127, 13128, 13130, 13133, 13137, 13139, 13142, 13143, 13145, 13149, 13153, 13157, 13158, 13160, 13163, 13165, 13166, 13169, 13175, 13176, 13177, 13178, 13179, 13180, 13181, 13182, 13183, 13186, 13189, 13190,

[0498] Detection: 13007, 13011, 13015, 13027, 13046, 13055, 13059, 13080, 13094, 13098, 13112, 13120, 13134, 13140, 13150, 13154, 13161, 13187,

[0499] Anchor: 13008, 13012, 13016, 13028, 13047, 13056, 13060, 13081, 13095, 13099, 13103, 13106, 13113, 13116, 13135, 13136, 13141, 13151, 13155, 13162, 13188,

### SEQ ID NO: 47

[0500] left Primer: 13191, 13195, 13196, 13197, 13199, 13200, 13204, 13206,

[0501] right Primer: 13192, 13198, 13201,

[0502] Detection: 13193, 13202,

[0503] Anchor: 13194, 13203, 13205,

### SEQ ID NO: 18

[0504] left Primer: 13207, 13212, 13213, 13226, 13228, 13231, 13235, 13240, 13245, 13247, 13248, 13250, 13254, 13256, 13258, 13264, 13265, 13268, 13269, 13273, 13274, 13277, 13279, 13280, 13281, 13286,

[0505] right Primer: 13208, 13211, 13214, 13217, 13220, 13222, 13224, 13225, 13227, 13229, 13232, 13233, 13234, 13237, 13239, 13241, 13242, 13244, 13246, 13249, 13251, 13255, 13257, 13259, 13262, 13263, 13266, 13267, 13270, 13275, 13276, 13282, 13285,

[0506] Detection: 13209, 13215, 13218, 13236, 13252, 13260, 13271, 13283,

[0507] Anchor: 13210, 13216, 13219, 13221, 13223, 13230, 13238, 13243, 13253, 13261, 13272, 13278, 13284,

### SEQ ID NO: 32

[0508] left Primer: 13641, 13645, 13646, 13649, 13650, 13652, 13653, 13654, 13655, 13658, 13659,

[0509] right Primer: 13642, 13647; 13648, 13656,

[0510] Detection: 13643,

[0511] Anchor: 13644, 13651, 13657,

### SEQ ID NO: 33

[0512] left Primer: 13660,

[0513] right Primer: 13661,

[0514] Detection: 13662,

[0515] Anchor: 13663,

### SEQ ID NO: 34

[0516] left Primer: 13664, 13669, 13670, 13671, 13672, 13673, 13675, 13676, 13677, 13681, 13683, 13685, 13687, 13689, 13691, 13693, 13696,

[0517] right Primer: 13665, 13668, 13674, 13678, 13682, 13684, 13686, 13688, 13690, 13692, 13694, 13695,

[0518] Detection: 13666, 13679,

[0519] Anchor: 13667, 13680,

### SEQ ID NO: 24

[0520] left Primer: 13697, 13701, 13702, 13703, 13709, 13713, 13714, 13715, 13719, 13721, 13722, 13726, 13728, 13732, 13735, 13740,

[0521] right Primer: 13698, 13704, 13705, 13706, 13707, 13708, 13710, 13716, 13717, 13718, 13720, 13723, 13724, 13725, 13727, 13729, 13733, 13734, 13736, 13739, 13741, 13744,

[0522] Detection: 13699, 13711, 13730, 13737, 13742,

[0523] Anchor: 13700, 13712, 13731, 13738, 13743,

### SEQ ID NO: 35

[0524] left Primer: 13745, 13749, 13751, 13752, 13753, 13754, 13758, 13762, 13765, 13766, 13768, 13772, 13773, 13774, 13777, 13778, 13779, 13783, 13785, 13790, 13791, 13797, 13802, 13803, 13805, 13806, 13807, 13809, 13812, 13814, 13816, 13817, 13818, 13819, 13820, 13823, 13824, 13826, 13828,

[0525] right Primer: 13746, 13755, 13759, 13763, 13764, 13767, 13769, 13775, 13776, 13780, 13784, 13786, 13788, 13789, 13792, 13795, 13796, 13798, 13800, 13804, 13808, 13813, 13815, 13821, 13822, 13829,

[0526] Detection: 13747, 13756, 13760, 13781, 13793, 13801, 13810, 13830,

[0527] Anchor: 13748, 13750, 13757, 13761, 13770, 13771, 13782, 13787, 13794, 13799, 13811, 13825, 13827, 13831,

### SEQ ID NO: 36

[0528] left Primer: 13832, 13837, 13841, 13844, 13845, 13846, 13849, 13854, 13855, 13856, 13857, 13861, 13865, 13869, 13871, 13875, 13879, 13880,

[0529] right Primer: 13833, 13836, 13838, 13843, 13847, 13850, 13853, 13858, 13862, 13866, 13870, 13872, 13876, 13881, 13882,

[0530] Detection: 13834, 13839, 13851, 13859, 13863, 13867, 13873, 13877,

[0531] Anchor: 13835, 13840, 13842, 13848, 13852, 13860, 13864, 13868, 13874, 13878,

### SEQ ID NO: 28

[0532] left Primer: 13883, 13889, 13894, 13902, 13903, 13910, 13911, 13914, 13915, 13916, 13928, 13929, 13930, 13931, 13935, 13936, 13937, 13944, 13947, 13948, 13950, 13960, 13961, 13962, 13964, 13965, 13966, 13968, 13970, 13971, 13972, 13976, 13978,

[0533] right Primer: 13884, 13887, 13890, 13893, 13895, 13898, 13900, 13904, 13905, 13906, 13907, 13908, 13909, 13912, 13913, 13917, 13920, 13921, 13922, 13923, 13924, 13925, 13926, 13932, 13938, 13941, 13942, 13943, 13945, 13946, 13949, 13953, 13954, 13956, 13957, 13958, 13959, 13963, 13967, 13969, 13974, 13975, 13977, 13980,

[0534] Detection: 13885, 13886, 13891, 13896, 13901, 13918, 13927, 13933, 13939, 13951,

[0535] Anchor: 13886, 13888, 13892, 13897, 13899, 13901, 13919, 13934, 13940, 13952, 13955, 13973, 13979,

### SEQ ID NO: 37

[0536] left Primer: 13981, 13988, 13989, 13990, 13992, 13994, 13995, 13999,

[0537] right Primer: 13982, 13985, 13986, 13987, 13991, 13993, 13996, 14000, 14001, 14002, 14003,

[0538] Detection: 13983, 13997,

[0539] Anchor: 13984, 13998,

### SEQ ID NO: 26

[0540] left Primer: 14004, 14009, 14014, 14017, 14020, 14024, 14026, 14029, 14035, 14036, 14040, 14043, 14045, 14051, 14057, 14058, 14059, 14063, 14065, 14066, 14067, 14068, 14069, 14070, 14071, 14073, 14074, 14078, 14079, 14080, 14081, 14082, 14083, 14084, 14085, 14087, 14094, 14095, 14100, 14108, 14109, 14113, 14114, 14118, 14120, 14121, 14122, 14130, 14133, 14138, 14141, 14142, 14143, 14147,

[0541] right Primer: 14005, 14008, 14010, 14013, 14015, 14018, 14021, 14025, 14027, 14028, 14030, 14033, 14034, 14037, 14038, 14039, 14041, 14042, 14044, 14046, 14049, 14050, 14052, 14055, 14056, 14060, 14064, 14072, 14077, 14086, 14088, 14089, 14090, 14091, 14092, 14093, 14096, 14097, 14098, 14099, 14101, 14102, 14103, 14104, 14105, 14106, 14107, 14110, 14115, 14123, 14126, 14127, 14132, 14134, 14135, 14136, 14137, 14139, 14140, 14144, 14145, 14148,

[0542] Detection: 14006, 14011, 14019, 14022, 14031, 14047, 14053, 14061, 14075, 14111, 14116, 14124, 14149,

[0543] Anchor: 14007, 14012, 14016, 14023, 14032, 14048, 14054, 14062, 14076, 14112, 14117, 14119, 14125, 14128, 14129, 14131, 14146, 14150,

### SEQ ID NO: 27

[0544] left Primer: 14151, 14155, 14157, 14161, 14166, 14171, 14175, 14183, 14187, 14190, 14192, 14194, 14195, 14196, 14200, 14201,

[0545] right Primer: 14152, 14156, 14158, 14162, 14165, 14167, 14170, 14172, 14176, 14179, 14180, 14182, 14184, 14185, 14186, 14188, 14189, 14191, 14193, 14197, 14198, 14199, 14202, 14203,

[0546] Detection: 14153, 14159, 14163, 14168, 14173, 14177,

[0547] Anchor: 14154, 14160, 14164, 14169, 14174, 14178, 14181,

### SEQ ID NO: 31

[0548] left Primer: 14204, 14210, 14211, 14216, 14217, 14223, 14226, 14228, 14229, 14230, 14233, 14235, 14239, 14241, 14243, 14244, 14250, 14254, 14255, 14256, 14257, 14260, 14261, 14262, 14267, 14268, 14269, 14273, 14274, 14277, 14281, 14284, 14286, 14289, 14292, 14293, 14297, 14299, 14301, 14304, 14305, 14306, 14312, 14316, 14320, 14322, 14324, 14328, 14329, 14331, 14337, 14342, 14344, 14346, 14347, 14349, 14350, 14353, 14356, 14361, 14363, 14364, 14365, 14366,

[0549] right Primer: 14205, 14208, 14212, 14215, 14218, 14221, 14224, 14225, 14227, 14231, 14236, 14240, 14242, 14245, 14246, 14247, 14251, 14263, 14266, 14270, 14278, 14282, 14283, 14285, 14287, 14290, 14291, 14294, 14298, 14300, 14302, 14303, 14307, 14310, 14313, 14317, 14323, 14325, 14327, 14330, 14334, 14338, 14340, 14341, 14345, 14348, 14351, 14352, 14354, 14355, 14357, 14358, 14359, 14360, 14367,

[0550] Detection: 14206, 14213, 14219, 14237, 14248, 14252, 14258, 14264, 14271, 14275, 14279, 14295, 14308, 14311, 14314, 14318, 14332, 14335, 14339, 14343,

[0551] Anchor: 14207, 14209, 14214, 14220, 14222, 14232, 14234, 14238, 14249, 14253, 14259, 14265, 14272, 14276, 14280, 14288, 14296, 14309, 14315, 14319, 14321, 14326, 14333, 14336, 14362,

### SEQ ID NO: 40

[0552] left Primer: 14368, 14372, 14373, 14375, 14386,

[0553] right Primer: 14369, 14374, 14376, 14379, 14380, 14381, 14382, 14383, 14384, 14385,

[0554] Detection: 14370, 14377,

[0555] Anchor: 14371, 14378,

[0556] In an alternative most preferred embodiment of the method, the subsequent amplification of d) is carried out in the presence of blocking oligonucleotides, as described above. Said blocking oligonucleotides comprising a sequence having a length of at least 9 nucleotides which hybridizes to a treated nucleic acid sequence according to one of SEQ ID NOS:304 to SEQ ID NO:535 and sequences complementary thereto, wherein the base sequence of said oligomers comprises at least one CpG, TpG or CpA dinucleotide. Step e) of the method, namely the detection of the specific amplificates indicative of the methylation status of one or more CpG positions according to SEQ ID NOS:1 to SEQ ID NO:64 is carried out by means of real-time detection methods as described above.

[0557] In a further preferred embodiment of the method the sequence(s) of the blocking oligonucleotides are selected from the group consisting of SEQ ID NOS:2114, 2119, 2124, 2125, 2127, 2132, 2133, 2135, 2137, 2138, 2139, 2140, 2141, 2142, 2143, 2144, 2146, 2147, 2148, 2149, 2150, 2151, 2152, 2153, 2154, 2155, 2156, 2157, 2158, 2159, 2160, 2031, 2082, 2087, 2089, 2094, 2095, 2096, 2097, 2099, 2107, 1980, 2018, 2022, 2023, 2026, 1939, 1966, 1973, 1974, 1975, 1926, 1930, 1931, 1932, 1933, 1934, 1903, 1917, 1921, 1834, 1896, 1805, 1819, 1821, 1823, 1824, 1825, 1826, 1827, 1828, 1829, 1770, 1782, 1785, 1786, 1788, 1789, 1790, 1792, 1795, 1796, 1797, 1798, 1799, 1800, 1748, 1759, 1760, 1761, 1762, 1763, 1764, 1765, 1724, 1741, 1597, 1609, 1610, 1611, 1612, 1613, 1614, 1615, 1616, 1617, 1618, 1619, 1620, 1621, 1622, 1623, 1624, 1625, 1626, 1627, 1628, 1629, 1630, 1631, 1633, 1634, 1635, 1636, 1637, 1638, 1639, 1640, 1641, 1642, 1643, 1644, 1645, 1646, 1647, 1648, 1649, 1650, 1651, 1652, 1653, 1654, 1655, 1656, 1657, 1658, 1659, 1660, 1661, 1662, 1663, 1668, 1684, 1685, 1686, 1687, 1688, 1689, 1690, 1691, 1692, 1693, 1694, 1695, 1696, 1697, 1698, 1699, 1700, 1701, 1706, 1712, 1713, 1715, 1716, 1717, 1718, 1719, 1571, 1579, 1581, 1584, 1585, 1586, 1587, 1588, 1591, 1592, 1537, 1555, 1556, 1557, 1558, 1559, 1560, 1561, 1562, 1563, 1564, 1565, 1566, 1452, 1455, 1456, 1457, 1458, 1463, 1514, 1515, 1516, 1517, 1518, 1519, 1524, 1525, 1526, 1527, 1528, 1529, 1531, 1532, 1372, 1423, 1424, 1425, 1427, 1432, 1433, 1434, 1435, 1436, 1437, 1440, 1441, 1442, 1443, 1444, 1445, 1446, 1447, 1343, 1358, 1359, 1360, 1361, 1362, 1363, 1364, 1365, 1366, 1367, 1310, 1315, 1316, 1317, 1318, 1319, 1320, 1321, 1322, 1324, 1325, 1327, 1328, 1330, 1332, 1334, 1337, 1338, 1276, 1290, 1305, 1203, 1228, 1238, 1239, 1240, 1247, 1248, 1255, 1256, 1265, 1268, 1269, 1164, 1171, 1172, 1173, 1174, 1176, 1177, 1178, 1179, 1180, 1181, 1182, 1183, 1184, 1185, 1186, 1187, 1188, 1189, 1190, 1191, 1192, 1193, 1194, 1195, 1196, 1197, 1198, 2725, 2748, 2749, 2750, 2710, 2717, 2718, 2719, 2720, 2721, 2684, 2699, 2703, 2704, 2705, 2706, 2658, 2662, 2679, 2603, 2613, 2617, 2585, 2594, 2595, 2596, 2597, 2598, 2599, 2489, 2497, 2498, 2499, 2500, 2501, 2504, 2505, 2507, 2508, 2510, 2511, 2512, 2513, 2514, 2515, 2519, 2520, 2521, 2522, 2525, 2526, 2527, 2528, 2529, 2530, 2531, 2532, 2534, 2535, 2536, 2537, 2539, 2540, 2541, 2542, 2543, 2544, 2545, 2546, 2547, 2550, 2551, 2552, 2553, 2554, 2558, 2563, 2564, 2572, 2580, 2581, 2472, 2482, 2484, 2408, 2464, 2465, 2466, 2467, 2468, 2339, 2349, 2367, 2370, 2372, 2373, 2374, 2375, 2376, 2377, 2378, 2379, 2380, 2382, 2386, 2387, 2389, 2393, 2394, 2395, 2396, 2397, 2398, 2402, 2403, 2404, 2327, 2333, 2334, 2335, 2305, 2315, 2318, 2260, 2268, 2270, 2271, 2272, 2273, 2274, 2275, 2276, 2277, 2278, 2279, 2280, 2281, 2282, 2283, 2284, 2285, 2286, 2287, 2288, 2289, 2290, 2291, 2292, 2293, 2294, 2295, 2296, 2297, 2298, 2299, 2300, 2301, 2232, 2245, 2246, 2248, 2249, 2250, 2251, 2252, 2254, 2255, 2256, 2210, 2218, 2219, 2221, 2222, 2223, 2227, 2228, 2202, 2204, 2205, 2206, 2164, 2180, 2183, 2187, 2188, 2189, 2190, 2191, 2192, 2193, 2194, 2195, 2196, 2197 and 2198.

[0558] Step e) of the method, namely the detection of the specific amplificates indicative of the methylation status of one or more CpG positions according to SEQ ID NOS:1 to SEQ ID NO:64 is carried out by means of real-time detection methods as described above, and wherein the sequence of said hybridization probes is selected from the group consisting of SEQ ID NOS:1162, 1163, 1201, 1202, 1208, 1211, 1217, 1274, 1288, 1275, 1289, 1299, 1308, 1309, 1341, 1342, 1347, 1351, 1354, 1372, 1423, 1424, 1425, 1427, 1432, 1433, 1434, 1435, 1436, 1437, 1440, 1441, 1442, 1443, 1444, 1445, 1446, 1447, 1370, 1371, 1400, 1450, 1461, 1451, 1462, 1467, 1470, 1473, 1475, 1535, 1536, 1542, 1544, 1569, 1570, 1583, 1590, 1595, 1666, 1704, 1596, 1601, 1603, 1667, 1705, 1722, 1723, 1727, 1735, 1746, 1747, 1768, 1769, 1773, 1803, 1804, 1807, 1810, 1832, 1833, 1836, 1867, 1871, 1901, 1902, 1908, 1911, 1924, 1925, 1937, 1938, 1943, 1946, 1949, 1956, 1957, 1978, 1979, 1986, 1992, 1998, 2001, 2003, 2010, 2020, 2025, 2029, 2030, 2113, 2163, 2201, 2209, 2231, 2259, 2304, 2326, 2338, 2348, 2351, 2369, 2407, 2471, 2488, 2557, 2584, 2602, 2616, 2657, 2661, 2664, 2671, 2683, 2709 and SEQ ID NO: 2724.

[0559] For each genomic sequence listed, the following oligonucleotides as detailed in the sequence listing may be used for a combined Blocking oligonucleotide-RealTime analysis: Lightcycler dual probe detection assays:

### SEQ ID NO: 41

[0560] left Primer: 1161, 1165, 1166, 1167,

[0561] right Primer: 1160, 1168, 1169, 1170, 1175,

[0562] Blocker: 1164, 1171, 1172, 1173, 1174, 1176, 1177, 1178, 1179, 1180, 1181, 1182, 1183, 1184, 1185, 1186, 1187, 1188, 1189, 1190, 1191, 1192, 1193, 1194, 1195, 1196, 1197, 1198,

[0563] Detection: 1162,

[0564] Anchor: 1163,

### SEQ ID NO: 6

[0565] left Primer: 1200, 1204, 1205, 1206, 1207, 1209, 1210, 1212, 1213, 1214, 1215, 1216, 1218,

[0566] right Primer: 1199, 1219, 1220, 1221, 1222, 1223, 1224, 1225, 1226, 1227, 1229, 1230, 1231, 1232, 1233, 1234, 1235, 1236, 1237, 1241, 1242, 1243, 1244, 1245, 1246, 1249, 1250, 1251, 1252, 1253, 1254, 1257, 1258, 1259, 1260, 1261, 1262, 1263, 1264, 1266, 1267, 1270, 1271,

[0567] Blocker: 1203, 1228, 1238, 1239, 1240, 1247, 1248, 1255, 1256, 1265, 1268, 1269,

[0568] Detection: 1201,

[0569] Anchor: 1202, 1208, 1211, 1217,

### SEQ ID NO: 14

[0570] left Primer: 1273, 1277, 1278, 1279, 1280, 1281, 1282, 1283, 1287, 1291, 1292, 1293, 1294, 1295, 1296, 1297, 1298, 1300, 1301, 1302, 1303,

[0571] right Primer: 1272, 1284, 1285, 1286, 1304,

[0572] Blocker: 1276, 1290, 1305,

[0573] Detection: 1274, 1288,

[0574] Anchor: 1275, 1289, 1299,

### SEQ ID NO: 7

[0575] left Primer: 1307, 1311,

[0576] right Primer: 1306, 1312, 1313, 1314, 1323, 1326, 1329, 1331, 1333, 1335, 1336,

[0577] Blocker: 1310, 1315, 1316, 1317, 1318, 1319, 1320, 1321, 1322, 1324, 1325, 1327, 1328, 1330, 1332, 1334, 1337, 1338,

[0578] Detection: 1308,

[0579] Anchor: 1309,

### SEQ ID NO: 44

[0580] left Primer: 1340, 1344, 1345, 1346, 1348, 1349, 1350, 1352, 1353, 1355,

[0581] right Primer: 1339, 1356, 1357,

[0582] Blocker: 1343, 1358, 1359, 1360, 1361, 1362, 1363, 1364, 1365, 1366, 1367,

[0583] Detection: 1341,

[0584] Anchor: 1342, 1347, 1351, 1354,

### SEQ ID NO:1

[0585] left Primer: 1369, 1373, 1374, 1375, 1376, 1377, 1378, 1379, 1380, 1381, 1382, 1383, 1384, 1385, 1386, 1387, 1388, 1389, 1390, 1391, 1392, 1393, 1394, 1395, 1396, 1397, 1398, 1399, 1401, 1402, 1403, 1404, 1405, 1406, 1407, 1408, 1409, 1410, 1411, 1412, 1413, 1414, 1415, 1416, 1417, 1418, 1419, 1420, 1421,

[0586] right Primer: 1368, 1422, 1426, 1428, 1429, 1430, 1431, 1438, 1439,

[0587] Blocker: 1372, 1423, 1424, 1425, 1427, 1432, 1433, 1434, 1435, 1436, 1437, 1440, 1441, 1442, 1443, 1444, 1445, 1446, 1447,

[0588] Detection: 1370,

[0589] Anchor: 1371, 1400,

### SEQ ID NO: 9

[0590] left Primer: 1449, 1453, 1454, 1460, 1464, 1465, 1466, 1468, 1469, 1471, 1472, 1474, 1476, 1477, 1478, 1479, 1480, 1481, 1482, 1483, 1484, 1485, 1486, 1487, 1488, 1489, 1490, 1491, 1492, 1493, 1494, 1495, 1496, 1497, 1498, 1499, 1500, 1501, 1502, 1503, 1504, 1505, 1506, 1507, 1508, 1509, 1510,

[0591] right Primer: 1448, 1459, 1511, 1512, 1513, 1520, 1521, 1522, 1523, 1530,

[0592] Blocker: 1452, 1455, 1456, 1457, 1458, 1463, 1514, 1515, 1516, 1517, 1518, 1519, 1524, 1525, 1526, 1527, 1528, 1529, 1531, 1532,

[0593] Detection: 1450, 1461,

[0594] Anchor: 1451, 1462, 1467, 1470, 1473, 1475,

### SEQ ID NO: 46

[0595] left Primer: 1534, 1538, 1539, 1540, 1541, 1543, 1545, 1546, 1547, 1548, 1549, 1550, 1551, 1552, 1553, 1554,

[0596] right Primer: 1533,

[0597] Blocker: 1537, 1555, 1556, 1557, 1558, 1559, 1560, 1561, 1562, 1563, 1564, 1565, 1566,

[0598] Detection: 1535,

[0599] Anchor: 1536, 1542, 1544,

### SEQ ID NO: 10

[0600] left Primer: 1568, 1572, 1573,

[0601] right Primer: 1567, 1574, 1575, 1576, 1577, 1578, 1580, 1582, 1589,

[0602] Blocker: 1571, 1579, 1581, 1584, 1585, 1586, 1587, 1588, 1591, 1592,

[0603] Detection: 1569,

[0604] Anchor: 1570, 1583, 1590,

### SEQ ID NO: 12

[0605] left Primer: 1594, 1598, 1599, 1600, 1602, 1604, 1605, 1606, 1607, 1665, 1669, 1670, 1671, 1672, 1673, 1674, 1675, 1676, 1677, 1678, 1679, 1680, 1681, 1682, 1703, 1707, 1708,

[0606] right Primer: 1593, 1608, 1632, 1664, 1683, 1702, 1709, 1710, 1711, 1714,

[0607] Blocker: 1597, 1609, 1610, 1611, 1612, 1613, 1614, 1615, 1616, 1617, 1618, 1619, 1620, 1621, 1622, 1623, 1624, 1625, 1626, 1627, 1628, 1629, 1630, 1631, 1633, 1634, 1635, 1636, 1637, 1638, 1639, 1640, 1641, 1642, 1643, 1644, 1645, 1646, 1647, 1648, 1649, 1650, 1651, 1652, 1653, 1654, 1655, 1656, 1657, 1658, 1659, 1660, 1661, 1662, 1663, 1668, 1684, 1685, 1686, 1687, 1688, 1689, 1690, 1691, 1692, 1693, 1694, 1695, 1696, 1697; 1698, 1699, 1700, 1701, 1706, 1712, 1713, 1715, 1716, 1717, 1718, 1719,

[0608] Detection: 1595, 1666, 1704,

[0609] Anchor: 1596, 1601, 1603, 1667, 1705,

### SEQ ID NO: 13

[0610] left Primer: 1721, 1725, 1726, 1728, 1729, 1730, 1731, 1732, 1733, 1734, 1736, 1737,

[0611] right Primer: 1720, 1738, 1739, 1740, 1742, 1743,

[0612] Blocker: 1724, 1741,

[0613] Detection: 1722,

[0614] Anchor: 1723, 1727, 1735,

### SEQ ID NO:3

[0615] left Primer: 1745, 1749, 1750, 1751, 1752, 1753, 1754, 1755, 1758,

[0616] right Primer: 1744, 1756, 1757,

[0617] Blocker: 1748, 1759, 1760, 1761, 1762, 1763, 1764, 1765,

[0618] Detection: 1746,

[0619] Anchor: 1747,

### SEQ ID NO: 18

[0620] left Primer: 1767, 1771, 1772, 1774, 1775, 1776, 1777, 1778,

[0621] right Primer: 1766, 1779, 1780, 1781, 1783, 1784, 1787, 1791, 1793, 1794,

[0622] Blocker: 1770, 1782, 1785, 1786, 1788, 1789, 1790, 1792, 1795, 1796, 1797, 1798, 1799, 1800,

[0623] Detection: 1768,

[0624] Anchor: 1769, 1773,

### SEQ ID NO: 17

[0625] left Primer: 1802, 1806, 1808, 1809, 1811, 1812, 1813, 1814,

[0626] right Primer: 1801, 1815, 1816, 1817, 1818, 1820, 1822,

[0627] Blocker: 1805, 1819, 1821, 1823, 1824, 1825, 1826, 1827, 1828, 1829,

[0628] Detection: 1803,

[0629] Anchor: 1804, 1807, 1810,

### SEQ ID NO: 21

[0630] left Primer: 1831, 1835, 1837, 1838, 1839, 1840, 1841, 1842, 1843, 1844, 1845, 1846, 1847, 1848, 1849, 1850, 1851, 1852, 1853, 1854, 1855, 1856, 1857, 1858, 1859, 1860, 1861, 1862, 1863, 1864, 1865, 1866, 1868, 1869, 1870, 1872, 1873, 1874, 1875, 1876, 1877, 1878, 1879, 1880, 1881, 1882, 1883, 1884, 1887, 1889, 1890, 1891, 1895,

[0631] right Primer: 1830, 1885, 1886, 1888, 1892, 1893, 1894, 1897, 1898,

[0632] Blocker: 1834, 1896,

[0633] Detection: 1832,

[0634] Anchor: 1833, 1836, 1867, 1871,

### SEQ ID NO: 35

[0635] left Primer: 1900, 1904, 1905, 1906,

[0636] right Primer: 1899, 1907, 1909, 1910, 1912, 1913, 1914, 1915, 1916, 1918, 1919, 1920,

[0637] Blocker: 1903, 1917, 1921,

[0638] Detection: 1901,

[0639] Anchor: 1902, 1908, 1911,

### SEQ ID NO: 25

[0640] left Primer: 1923,

[0641] right Primer: 1922, 1927, 1928, 1929,

[0642] Blocker: 1926, 1930, 1931, 1932, 1933, 1934,

[0643] Detection: 1924,

[0644] Anchor: 1925,

### SEQ ID NO: 26

[0645] left Primer: 1936, 1940, 1941, 1942, 1944, 1945, 1947, 1948, 1950, 1951, 1952,

[0646] right Primer: 1935, 1953, 1954, 1955, 1958, 1959, 1960, 1961, 1962, 1963, 1964, 1965, 1967, 1968, 1969, 1970, 1971, 1972,

[0647] Blocker: 1939, 1966, 1973, 1974, 1975,

[0648] Detection: 1937,

[0649] Anchor: 1938, 1943, 1946, 1949, 1956, 1957,

### SEQ ID NO: 38

[0650] left Primer: 1977, 1981, 1982, 1983, 1984, 1985, 1987, 1988, 1989, 1990, 1991, 1993, 1994, 1995, 1996, 1997, 1999, 2000, 2002, 2004, 2005., 2006, 2007, 2008, 2009, 2011, 2012,

[0651] right Primer: 1976, 2013, 2014, 2015, 2016, 2017, 2019, 2021, 2024,

[0652] Blocker: 1980, 2018, 2022, 2023, 2026,

[0653] Detection: 1978,

[0654] Anchor: 1979, 1986, 1992, 1998, 2001, 2003, 2010, 2020, 2025,

### SEQ ID NO: 27

[0655] left Primer: 2028, 2032, 2033, 2034, 2035, 2036, 2037, 2038, 2039, 2040, 2041, 2042, 2043, 2044, 2045, 2046, 2047, 2048, 2049, 2050, 2051, 2052, 2053, 2054, 2055, 2056, 2057, 2058, 2059, 2060, 2061, 2062, 2063, 2064, 2065, 2066, 2067, 2068, 2069, 2070, 2071, 2072, 2073, 2074, 2075, 2076, 2077,

[0656] right Primer: 2027, 2078, 2079, 2080, 2081, 2083, 2084, 2085, 2086, 2088, 2090, 2091, 2092, 2093, 2098, 2100, 2101, 2102, 2103, 2104, 2105, 2106, 2108, 2109, 2110,

[0657] Blocker: 2031, 2082, 2087, 2089, 2094, 2095, 2096, 2097, 2099, 2107,

[0658] Detection: 2029,

[0659] Anchor: 2030,

### Taqman Real-Time Single Probe Detection Assays:

### SEQ ID NO: 41

[0660] left Primer: 2112, 2115, 2116, 2117,

[0661] right Primer: 2111, 2118, 2120, 2121, 2122, 2123, 2126, 2128, 2129, 2130, 2131, 2134, 2136, 2145,

[0662] Blocker: 2114, 2119, 2124, 2125, 2127, 2132,2133, 2135, 2137, 2138, 2139, 2140, 2141, 2142, 2143, 2144, 2146, 2147, 2148, 2149, 2150, 2151, 2152,2153, 2154, 2155, 2156, 2157, 2158, 2159, 2160,

[0663] Detection: 2113,

### SEQ ID NO: 6

[0664] left Primer: 2162, 2165, 2166, 2167, 2168, 2169, 2170, 2171, 2172, 2173,

[0665] right Primer: 2161, 2174, 2175, 2176, 2177, 2178, 2179, 2181, 2182, 2184, 2185, 2186,

[0666] Blocker: 2164, 2180, 2183, 2187, 2188, 2189, 2190, 2191, 2192, 2193, 2194, 2195, 2196, 2197, 2198,

[0667] Detection: 2163,

### SEQ ID NO: 8

[0668] left Primer: 2199, 2203,

[0669] right Primer: 2200,

[0670] Blocker: 2202, 2204, 2205, 2206,

[0671] Detection: 2201,

### SEQ ID NO: 14

[0672] left Primer: 2208, 2211, 2212, 2213, 2214,

[0673] right Primer: 2207, 2215, 2216, 2217; 2220, 2224, 2225, 2226,

[0674] Blocker: 2210, 2218, 2219, 2221, 2222, 2223, 2227, 2228,

[0675] Detection: 2209,

### SEQ ID NO: 9

[0676] left Primer: 2230, 2233, 2234, 2235, 2236, 2237, 2238, 2239, 2240, 2241, 2242, 2243, 2244,

[0677] right Primer: 2229, 2247, 2253,

[0678] Blocker: 2232, 2245, 2246, 2248, 2249, 2250, 2251, 2252, 2254, 2255, 2256,

[0679] Detection: 2231,

### SEQ ID NO: 46

[0680] left Primer: 2257, 2264, 2265, 2266, 2267, 2269,

[0681] right Primer: 2258, 2261, 2262, 2263,

[0682] Blocker: 2260, 2268, 2270, 2271, 2272, 2273, 2274, 2275, 2276, 2277, 2278, 2279, 2280, 2281, 2282, 2283, 2284, 2285, 2286, 2287, 2288, 2289, 2290, 2291, 2292, 2293, 2294, 2295, 2296, 2297, 2298, 2299, 2300, 2301,

[0683] Detection: 2259,

### SEQ ID NO: 13

[0684] left Primer: 2303, 2306, 2307, 2308, 2309, 2310, 2311, 2312, 2313,

[0685] right Primer: 2302, 2314, 2316, 2317, 2319, 2320, 2321, 2322, 2323,

[0686] Blocker: 2305, 2315, 2318,

[0687] Detection: 2304,

### SEQ ID NO: 18

[0688] left Primer: 2325, 2328, 2329, 2330,

[0689] right Primer: 2324, 2331, 2332,

[0690] Blocker: 2327, 2333, 2334, 2335,

[0691] Detection: 2326,

### SEQ ID NO: 20

[0692] left Primer: 2337, 2340, 2341, 2342, 2343, 2344, 2345, 2346, 2366, 2368, 2371, 2381, 2383, 2384, 2385, 2388, 2390, 2391, 2392, 2399, 2400, 2401,

[0693] right Primer: 2336, 2347, 2350, 2352, 2353, 2354, 2355, 2356, 2357, 2358, 2359, 2360, 2361, 2362, 2363, 2364, 2365,

[0694] Blocker: 2339, 2349, 2367, 2370, 2372, 2373, 2374, 2375, 2376, 2377, 2378, 2379, 2380, 2382, 2386, 2387, 2389, 2393, 2394, 2395, 2396, 2397, 2398, 2402, 2403, 2404,

[0695] Detection: 2338, 2348, 2351, 2369,

### SEQ ID NO: 48

[0696] left Primer: 2406, 2409, 2410, 2411, 2412, 2413, 2414, 2415, 2416, 2417, 2418, 2419, 2420, 2421, 2422, 2423, 2424, 2425, 2426, 2427, 2428, 2429, 2430, 2431, 2432, 2433, 2434, 2435, 2436, 2437, 2438, 2439, 2440, 2441, 2442, 2443, 2444, 2445, 2446, 2447, 2448, 2449, 2450, 2451, 2452, 2453, 2454, 2455, 2456, 2457, 2458, 2459, 2460, 2461, 2462, 2463,

[0697] right Primer: 2405,

[0698] Blocker: 2408, 2464, 2465, 2466, 2467, 2468,

[0699] Detection: 2407,

### SEQ ID NO: 22

[0700] left Primer: 2469, 2483, 2485,

[0701] right Primer: 2470, 2473, 2474, 2475, 2476, 2477, 2478, 2479, 2480, 2481,

[0702] Blocker: 2472, 2482, 2484,

[0703] Detection: 2471,

### SEQ ID NO: 19

[0704] left Primer: 2486, 2494, 2495, 2496, 2502, 2503, 2506, 2509, 2516, 2517, 2518, 2523, 2524, 2533, 2538, 2548, 2549, 2556,

[0705] right Primer: 2487, 2490, 2491, 2492, 2493, 2555, 2559, 2560, 2561, 2562, 2565, 2566, 2567, 2568, 2569, 2570, 2571, 2573, 2574, 2575, 2576, 2577, 2578, 2579,

[0706] Blocker: 2489, 2497, 2498, 2499, 2500, 2501, 2504, 2505, 2507, 2508, 2510, 2511, 2512, 2513, 2514, 2515, 2519, 2520, 2521, 2522, 2525, 2526, 2527, 2528, 2529, 2530, 2531, 2532, 2534, 2535, 2536, 2537, 2539, 2540, 2541, 2542, 2543, 2544, 2545, 2546, 2547, 2550, 2551, 2552, 2553, 2554, 2558, 2563, 2564, 2572, 2580, 2581,

[0707] Detection: 2488, 2557,

### SEQ ID NO: 17

[0708] left Primer: 2583, 2586, 2587, 2588, 2589, 2590, 2591,

[0709] right Primer: 2582, 2592, 2593,

[0710] Blocker: 2585, 2594, 2595, 2596, 2597, 2598, 2599,

[0711] Detection: 2584,

### SEQ ID NO: 21

[0712] left Primer: 2600, 2612, 2615, 2618, 2619, 2620, 2621, 2622, 2623, 2624, 2625, 2626, 2627, 2628, 2629, 2630, 2631, 2632, 2633, 2634, 2635, 2636, 2637, 2638, 2639, 2640, 2641, 2642, 2643, 2644, 2645, 2646, 2647,

[0713] right Primer: 2601, 2604, 2605, 2606, 2607, 2608, 2609, 2610, 2611, 2614, 2648, 2649, 2650, 2651, 2652, 2653, 2654,

[0714] Blocker: 2603, 2613, 2617,

[0715] Detection: 2602, 2616,

### SEQ ID NO: 36

[0716] left Primer: 2655, 2659, 2676, 2677, 2678, 2680,

[0717] right Primer: 2656, 2660, 2663, 2665, 2666, 2667, 2668, 2669, 2670, 2672, 2673, 2674, 2675,

[0718] Blocker: 2658, 2662, 2679,

[0719] Detection: 2657, 2661, 2664, 2671,

### SEQ ID NO: 26

[0720] left Primer: 2682, 2685, 2686, 2687, 2688, 2689,

[0721] right Primer: 2681, 2690, 2691, 2692, 2693, 2694, 2695, 2696, 2697, 2698, 2700, 2701, 2702,

[0722] Blocker: 2684, 2699, 2703, 2704, 2705, 2706,

[0723] Detection: 2683,

### SEQ ID NO: 38

[0724] left Primer: 2708, 2711, 2712, 2713, 2714, 2715,

[0725] right Primer: 2707, 2716,

[0726] Blocker: 2710, 2717, 2718, 2719, 2720, 2721,

[0727] Detection: 2709,

### SEQ ID NO: 27

[0728] left Primer: 2723, 2726, 2727, 2728, 2729, 2730, 2731, 2732, 2733, 2734, 2735, 2736, 2737, 2738, 2739, 2740, 2741, 2742, 2743, 2745,

[0729] right Primer: 2722, 2744, 2746, 2747,

[0730] Blocker: 2725, 2748, 2749, 2750,

[0731] Detection: 2724,

[0732] Additional embodiments of the invention provide a method for the analysis of the methylation status of genomic DNA according to the invention (SEQ ID NOS:1 to SEQ ID NO:64, and complements thereof) without the need for pretreatment.

[0733] In the first step of such additional embodiments, the genomic DNA sample is isolated from tissue or cellular sources. Preferably, such sources include cell lines, histological slides, body fluids, or tissue embedded in paraffin. In the second step, the genomic DNA is extracted.

[0734] Extraction may be by means that are standard to one skilled in the art, including but not limited to the use of detergent lysates, sonification and vortexing with glass beads. Once the nucleic acids have been extracted, the genomic double-stranded DNA is used in the analysis.

[0735] In a preferred embodiment, the DNA may be cleaved prior to the treatment, and this may be by any means standard in the state of the art, in particular with methylation-sensitive restriction endonucleases.

[0736] In the third step, the DNA is then digested with one or more methylation sensitive restriction enzymes. The digestion is carried out such that hydrolysis of the DNA at the restriction site is informative of the methylation status of a specific CpG dinucleotide.

[0737] In the fourth step, which is optional but a preferred embodiment, the restriction fragments are amplified. This is preferably carried out using a polymerase chain reaction, and said amplificates may carry suitable detectable labels as discussed above, namely fluorophore labels, radionuclides and mass labels.

[0738] In the fifth step the amplificates are detected. The detection may be by any means standard in the art, for example, but not limited to, gel electrophoresis analysis, hybridization analysis, incorporation of detectable tags within the PCR products, DNA array analysis, MALDI or ESI analysis.

[0739] Subsequent to the determination of the methylation state of the genomic nucleic acids the presence, absence or subclass of colorectal cell proliferative disorder is deduced based upon the methylation state of at least one CpG dinucleotide sequence of SEQ ID NOS:1 to SEQ ID NO:64, or an average, or a value reflecting an average methylation state of a plurality of CpG dinucleotide sequences of SEQ ID NOS:1 to SEQ ID NO:64. In an alternative embodiment the presence or absence of an aerodigestive cell proliferative disorder selected from the group consisting is deduced based upon the methylation state of at least one CpG dinucleotide sequence of SEQ ID NOS:20, 41, 35, 3, 39, 33, or an average, or a value reflecting an average methylation state of a plurality of CpG dinucleotide sequences of SEQ ID NOS:20, 41, 35, 3, 39, 33.

### Diagnostic Assays for Colorectal Cell Proliferative Disorders

[0740] The present invention enables diagnosis of events which are disadvantageous to patients or individuals in which important genetic and/or epigenetic parameters within one or more of SEQ ID NOS:1 to SEQ ID NO:64 may be used as markers. Said parameters obtained by means of the present invention may be compared to another set of genetic and/or epigenetic parameters, the differences serving as the basis for a diagnosis and/or prognosis of events which are disadvantageous to patients or individuals.

[0741] More specifically the present invention enables the screening of at-risk populations for the early detection of colorectal carcinomas. Furthermore, specific embodiments of the present invention enable the detection of aerodigestive cancers and thus are additionally suitable for this purpose. Further embodiments of the method may also be used as alternatives to cytological screening for the differentiation of colorectal carcinomas from other colon cell proliferative disorders, e.g. colon polyps.

[0742] Specifically, the present invention provides for diagnostic cancer assays based on measurement of differential methylation of one or more CpG dinucleotide sequences of SEQ ID NOS:1 to SEQ ID NO:64, or of subregions thereof that comprise such a CpG dinucleotide sequence. Typically, such assays involve obtaining a tissue sample from a test tissue, performing an assay to measure the methylation status of at least one of one or more CpG dinucleotide sequences of SEQ ID NOS:1 to SEQ ID NO:64 derived from the tissue sample, relative to a control sample, or a known standard and making a diagnosis or prognosis based thereon.

[0743] In particular preferred embodiments, inventive oligomers are used to assess the CpG dinucleotide methylation status, such as those based on SEQ ID NOS:1 to SEQ ID NO:535, or arrays thereof, as well as in kits based thereon and useful for the diagnosis and/or prognosis of colorectal cell proliferative disorders.

### Kits

[0744] Moreover, an additional aspect of the present invention is a kit comprising, for example: a bisulfite-containing reagent; a set of primer oligonucleotides containing at least two oligonucleotides whose sequences in each case correspond, are complementary, or hybridize under stringent or highly stringent conditions to a 16-base long segment of the sequences SEQ ID NOs:1 to SEQ ID NO:535; oligonucleotides and/or PNA-oligomers; as well as instructions for carrying out and evaluating the described method. In a further preferred embodiment, said kit may further comprise standard reagents for performing a CpG position-specific methylation analysis, wherein said analysis comprises one or more of the following techniques: MS-SNuPE, MSP, MethyLight™, HeavyMethyl™, COBRA, and nucleic acid sequencing. However, a kit along the lines of the present invention can also contain only part of the aforementioned components.

[0745] While the present invention has been described with specificity in accordance with certain of its preferred embodiments, the following examples serve only to illustrate the invention and are not intended to limit the invention within the principles and scope of the broadest interpretations and equivalent configurations thereof.

### EXAMPLES

[0746] Samples were received either as frozen tissue or extracted genomic DNA. DNA samples were extracted using lysis buffer from Qiagen and the Roche magnetic separation kit for genomic DNA isolation. DNA samples were also extracted using Qiagen Genomic Tip-100 columns, as well as the MagnaPure device and Roche reagents. All samples were quantitated using spectrophotometric or fluorometric techniques and on agarose gels for a subset of samples.

Bisulfite Treatment and mPCR

[0747] Total genomic DNA of all samples was bisulfite treated converting unmethylated cytosines to uracil. Methylated cytosines remained conserved. Bisulfite treatment was performed with minor modifications according to the protocol described in Olek et al. (1996). In order to avoid processing all samples with the same biological background together resulting in a potential process-bias in the data later on, the samples were randomly grouped into processing batches. For bisulfite treatment we created batches of 50 samples randomized for sex, diagnosis, and tissue. Per DNA sample two independent bisulfite reactions were performed. After bisulfitation 10 ng of each DNA sample was used in subsequent mPCR reactions containing 6-8 primer pairs.

[0748] Each reaction contained the following:

[0749] 0.4 mM each dNTPS

[0750] 1 Unit Taq Polymerase

[0751] 2.5 μl PCR buffer

[0752] 3.5 mM MgCl2

[0753] 80 nM Primerset (12-16 primers)

[0754] 11.25 ng DNA (bisulfite treated)

Further details of the primers are shown in TABLE 1.

[0755] Forty cycles were carried out as follows: Denaturation at 95° C. for 15 min, followed by annealing at 55° C. for 45 sec., primer elongation at 65° C. for 2 min. A final elongation at 65° C. was carried out for 10 min.

### 1.1.2 Hybridization

[0756] All PCR products from each individual sample were then hybridised to glass slides carrying a pair of immobilised oligonucleotides for each CpG position under analysis. Each of these detection oligonucleotides was designed to hybridise to the bisulphite converted sequence around one CpG site which was either originally unmethylated (TG) or methylated (CG). See Table 2 for further details of all hybridisation oligonucleotides used (both informative and non-informative.) Hybridisation conditions were selected to allow the detection of the single nucleotide differences between the TG and CG variants.

[0757] 5 μl volume of each multiplex PCR product was diluted in 10× Ssarc buffer (10× Ssarc: 230 ml 20×SSC, 180 ml sodium lauroyl sarcosinate solution 20%, dilute to 1000 ml with dH2O). The reaction mixture was then hybridised to the detection oligonucleotides as follows. Denaturation at 95° C., cooling down to 10° C., hybridisation at 42° C. overnight followed by washing with 10× Ssarc and dH2O at 42° C.

[0758] Further details of the hybridisation oligonucleotides are shown in TABLE 2.

[0759] Fluorescent signals from each hybridised oligonucleotide were detected using genepix scanner and software. Ratios for the two signals (from the CG oligonucleotide and the TG oligonucleotide used to analyse each CpG position) were calculated based on comparison of intensity of the fluorescent signals.

[0760] The samples were processed in batches of 80 samples randomized for sex, diagnosis, tissue, and bisulphite batch For each bisulfite treated DNA sample 2 hybridizations were performed. This means that for each sample a total number of 4 chips were processed.

### Data Analysis Methods

### Analysis of the Chip Data:

### From Raw Hybridization Intensities to Methylation Ratios;

[0761] The log methylation ratio (log(CG/TG)) at each CpG position is determined according to a standardized preprocessing pipeline that includes the following steps:

[0762] For each spot the median background pixel intensity is subtracted from the median foreground pixel intensity (this gives a good estimate of background corrected hybridization intensities):

[0763] For both CG and TG detection oligonucleotides of each CpG position the background corrected median of the 4 redundant spot intensities is taken;

[0764] For each chip and each CpG position the log(CG/TG) ratio is calculated;

[0765] For each sample the median of log(CG/TG) intensities over the redundant chip repetitions is taken.

[0766] This ratio has the property that the hybridization noise has approximately constant variance over the full range of possible methylation rates (Huber et al., 2002).

### Principle Component Analysis

[0767] The principle component analysis (PCA) projects measurement vectors. (e.g. chip data, methylation profiles on several CpGs etc.) onto a new coordinate system. The new coordinate axes are referred to as principal components. The first principal component spans the direction of the largest variance of the data. Subsequent components are ordered by decreasing variance and are orthogonal to each other. Different CpG positions contribute with different weights to the extension of the data cloud along different components. PCA is an unsupervised technique, i.e., it does not take into account the labels of the data points (for further details see e.g. Ripley (1996)).

[0768] PCA is typically used to project high dimensional data (in our case methylation-array data) onto lower dimensional subspaces in order to visualize or extract features with high variance from the data. In the present report we use 2 dimensional projections for statistical quality control of the data. We investigate the effect of different process parameters on the chip data and exclude that changing process parameters cause large alterations in the measurement values.

[0769] A robust version of PCA is used to detect single outlier chips and exclude them from further analysis (Model et al., 2002).

### Hypothesis Testing

[0770] The main task is to identify markers that show significant differences in the average degree of methylation between two classes. A significant difference is detected when the nullhypothesis that the average methylation of the two classes is identical can be rejected with p<0.05. Because we apply this test to a whole set of potential markers we have to correct the p-values for multiple testing. This was done by applying the False Discovery Rate (FDR) method (Dudoit et al., 2002).

[0771] For testing the null hypothesis that the methylation levels in the two classes are identical we used the likelihood ratio test for logistic regression models (Venables and Ripley, 2002). The logistic regression model for a single marker is a linear combination of methylation measurements from all CpG positions in the respective genomic region of interest (ROI). A significant p-value for a marker means that this ROI has some systematic correlation to the question of interest as given by the two classes. However, at least formally it makes no statement about the actual predictive power of the marker.

### Class Prediction by Supervised Learning

[0772] In order to give a reliable estimate of how well the CpG ensemble of a selected marker can differentiate between different tissue classes we can determine its prediction accuracy by classification. For that purpose we calculate a methylation profile based prediction function using a certain set of tissue samples with their class label. This step is called training and it exploits the prior knowledge represented by the data labels. The prediction accuracy of that function is then tested by cross-validation or on a set of independent samples. As a method of choice, we use the support vector machine (SVM) algorithm (Duda (2001), Christiannini (2000)) to learn the prediction function. If not stated otherwise, for this report the risk associated with false positive or false negative classifications are set to be equal relative to the respective class sizes. It follows that the learning algorithm obtains a class prediction function with the objective to optimize accuracy on an independent test sample set. Therefore sensitivity and specificity of the resulting classifier can be expected to be approximately equal.

[0773] Estimating the performance of the tissue class prediction: Cross Validation With limited sample size the cross-validation method provides an effective and reliable estimate for the prediction accuracy of a discriminator function and therefore in addition to the significance of the markers we provide cross-validation accuracy, sensitivity and specificity estimates. For each classification task, the samples were partitioned into 5 groups of approximately equal size. Then the learning algorithm was trained on 4 of these 5 sample groups. The predictor obtained by this method was then tested on the remaining group of independent test samples. The number of correct positive and negative classifications was counted over 5 runs for the learning algorithm for all possible choices of the independent test group without using any knowledge obtained from the previous runs. This procedure was repeated on up to 10 random permutations of the sample set. Note that the above-described cross-validation procedure evaluates accuracy, sensitivity and specificity using practically all possible combinations of training and independent test sets. It therefore gives a better estimate of the prediction performance than simply splitting the samples into one training sample set and one independent test set.

### Results

[0774] FIGS. 1, 5, 9, 13, 16, 20, 24, 28 and 32 show ranked matrices of data obtained according to Examples 1 and 2 according to CpG methylation differences between the two classes of tissues, using an algorithim. The figures are shown in greyscale, wherein the most significant CpG positions are at the bottom of the matrix with significance decreasing towards the top. Black indicates total methylation at a given CpG position, white represents no methylation at the particular position, with degrees of methylation represented in grey, from light (low proportion of methylation) to dark (high proportion of methylation). Each row represents one specific CpG position within a gene and each column shows the methylation profile for the different CpGs for one sample. On the right side p values for the individual CpG positions are shown. The p values are the probabilities that the observed distribution occurred by chance in the data set.

[0775] FIG. 96 shows a ranked matrices of data obtained according to Examples 1 and 2 according to CpG methylation differences between the two classes of tissues, (aerodigestive cancer on the left and healthy aerodigestive tissues on the right) using an algorithim. The most significant CpG positions are at the bottom of the matrix with significance decreasing towards the top. Red indicates total methylation at a given CpG position, green represents no methylation at the particular position. Each row represents one specific CpG position within a gene and each column shows the methylation profile for the different CpGs for one sample.

[0776] FIGS. 2, 6, 10, 17, 21, 25, 29 and 33 show the uncorrected multivariate LogReg test results for each comparison. Each individual genomic region of interest is represented as a point, the dotted line represents the cut off point for the 25% false discovery rate.

[0777] FIGS. 3, 7, 11, 14, 18, 22, 26, 30 and 34 show ranked matrices of data obtained according to Examples 1 and 2 of the accuracy of the genewise linear support vector machine cross validations between the two classes of tissues, for the best performing markers. The figures are shown in greyscale, wherein the most significant CpG positions are at the bottom of the matrix with significance decreasing towards the top. Black indicates total methylation at a given CpG position, white represents no methylation at the particular position, with degrees of methylation represented in grey, from light (low proportion of methylation) to dark (high proportion of methylation). Each row represents one specific CpG position within a gene and each column shows the methylation profile for the different CpGs for one sample. On the right side accuracy values for each individual genomic region of interest are shown.

[0778] FIGS. 4, 8, 12, 15, 18, 23, 27, 31 and 35 shows the accuracy of the genewise linear support vector machine cross validation for all genomic regions of each classification. The accuracy of each genomic region is represented as black squares, the specificity as unfilled diamonds, the sensitivity as unfilled squares. The accuracy as measured on the X-axis shows the fraction of correctly classified samples.

Colon Normal Vs. Colorectal Cancer

[0779] In the first comparison 102 colorectal carcinoma samples were compared to 73 samples from normal colon, including colon polyps and colon inflammatory disorders.

[0780] FIG. 1 shows the multivariate test results of the top 12 performing markers using the conservative Bonferroni corrected LogReg test.

[0781] FIG. 2 shows the uncorrected multivariate LogReg test results for each comparison. Each individual genomic region of interest is represented as a point, the dotted line represents the cut off point for the 25% false discovery rate.

[0782] FIG. 3 shows the accuracy of the top 12 performing markers.

[0783] FIG. 4 shows the accuracy of the genewise linear support vector machine cross validation for all genomic regions of each classification.

[0784] The following genomic markers were evaluated as being significant: SEQ ID NOS:1-12, 15-20, 22, 25-36, 38-49, 51-58, and complements thereof.

Other Tissues Vs. Colorectal Cancer

[0785] In this classification 73 colorectal carcinoma samples were compared to an ‘other tissue’ class consisting of 140 samples from non-colorectal carcinomas, peripheral blood lymphocytes and other normal tissues of non-colorectal origin. These markers therefore enable the detection of colorectal carcinoma cells in, for example, body fluids such as serum.

[0786] FIG. 5 shows the multivariate test results of the top 12 performing markers using the conservative Bonferroni corrected LogReg test.

[0787] FIG. 6 shows the uncorrected multivariate LogReg test results for each comparison. Each individual genomic region of interest is represented as a point, the dotted line represents the cut off point for the 25% false discovery rate.

[0788] FIG. 7 shows the accuracy of the top 12 performing markers.

[0789] FIG. 8 shows the accuracy of the genewise linear support vector machine cross validation for all genomic regions of each classification.

[0790] The following genomic markers were evaluated as being significant:

[0791] SEQ ID NOS:1-23, 26-36, 38-43, 45-49, 51-58 and complements thereof.

Colon Normal and Other Tissue Vs. Colon Cancer

[0792] In this classification 73 colorectal carcinoma samples were compared to 242 colon normal and ‘other tissue’ samples. The colon normal class consisted of healthy colon, colon polyps and inflammatory disorder colon tissue samples, the ‘other tissues’ consisted of samples from non-colorectal carcinomas, peripheral blood lymphocytes and other normal tissues of non-colorectal origin.

[0793] FIG. 9 shows the multivariate test results of the top 12 performing markers using the conservative Bonferroni corrected LogReg test.

[0794] FIG. 10 shows the uncorrected multivariate LogReg test results for each comparison. Each individual genomic region of interest is represented as a point, the dotted line represents the cut off point for the 25% false discovery rate.

[0795] FIG. 11 shows the accuracy of the top 12 performing markers.

[0796] FIG. 12 shows the accuracy of the genewise linear support vector machine cross validation for all genomic regions of each classification.

[0797] The following genomic markers were evaluated as being significant:

[0798] SEQ ID NOS:1-3, 5-13, 15-23, 26-36, 38-43, 45-49, 51-58, and complements thereof.

Polyps vs. Colorectal Cancer

[0799] In this classification 73 colorectal carcinoma samples were compared to 51 colon polyp samples.

[0800] FIG. 13 shows the multivariate test results of the top performing markers using the conservative Bonferroni corrected LogReg test.

[0801] FIG. 14 shows the accuracy of the top 12 performing markers.

[0802] FIG. 15 shows the accuracy of the genewise linear support vector machine cross validation for all genomic regions of each classification.

[0803] The following genomic markers were evaluated as being significant:

[0804] SEQ ID NOS:11, 25, 27, 38, 40, 45, 53, and complements thereof.

Colon Normal Vs. Colorectal Cell Proliferative Disorder

[0805] In this calssification 124 colorectal cell proliferative disorder samples (consisting of colon polyps and colorectal carcinoma) were compared to 51 ‘normal colon’ samples consisting of both healthy colon samples and colon tissue of inflammatory disorders.

[0806] FIG. 16 shows the multivariate test results of the top 12 performing markers using the conservative Bonferroni corrected LogReg test.

[0807] FIG. 17 shows the uncorrected multivariate LogReg test results for each comparison. Each individual genomic region of interest is represented as a point, the dotted line represents the cut off point for the 25% false discovery rate.

[0808] FIG. 18 shows the accuracy of the top 12 performing markers.

[0809] FIG. 19 shows the accuracy of the genewise linear support vector machine cross validation for all genomic regions of each classification.

[0810] The following genomic markers were evaluated as being significant:

[0811] SEQ ID NOS:1-58, and complements thereof.

Colon Normal Vs. Colorectal Cancer

[0812] In this classification 73 colorectal carcinoma samples were compared to 51 ‘normal colon’ samples consisting of both healthy colon samples and colon tissue of inflammatory disorders.

[0813] FIG. 20 shows the multivariate test results of the top 12 performing markers using the conservative Bonferroni corrected LogReg test.

[0814] FIG. 21 shows the uncorrected multivariate LogReg test results for each comparison. Each individual genomic region of interest is represented as a point, the dotted line represents the cut off point for the 25% false discovery rate.

[0815] FIG. 22 shows the accuracy of the top 12 performing markers.

[0816] FIG. 23 shows the accuracy of the genewise linear support vector machine cross validation for all genomic regions of each classification.

[0817] The following genomic markers were evaluated as being significant:

[0818] SEQ ID NOS:1-3, 5-23, 25-36, 38-49, 51-58, and complements thereof.

Colon Normal and Other Tissues Vs. Colorectal Cell Proliferative Disorder

[0819] In this classification 124 colorectal cell proliferative disorder samples (consisting of colon polyps and colorectal carcinoma) were compared to a class consisting of ‘colon normal’ and ‘other tissue’ samples. The colon normal samples consisted of both healthy colon samples and colon tissue of inflammatory disorders, the ‘other tissue’ samples consisted of samples from non-colorectal carcinomas, peripheral blood lymphocytes and other normal tissues of non-colorectal origin.

[0820] FIG. 24 shows the multivariate test results of the top 12 performing markers using the conservative Bonferroni corrected LogReg test.

[0821] FIG. 25 shows the uncorrected multivariate LogReg test results for each comparison. Each individual genomic region of interest is represented as a point, the dotted line represents the cut off point for the 25% false discovery rate.

[0822] FIG. 26 shows the accuracy of the top 12 performing markers.

[0823] FIG. 27 shows the accuracy of the genewise linear support vector machine cross validation for all genomic regions of each classification.

[0824] The following genomic markers were evaluated as being significant: SEQ ID NOS:1-36, 38-43, 45-58, and complements thereof.

Other Tissue vs. Colon Tissue

[0825] The following comparison was carried out in order to identify markers capable of discerning elevated levels of free floating colon DNA, especially in bodily fluids as a marker of tumor progression. In this classification the ‘colon tissue’ class consisted of samples from colorectal carcinoma, colon polyps, colon tissue of inflammatory disorders and healthy colon tissue. The ‘other tissue’ class consisted of samples from non-colorectal carcinomas, peripheral blood lymphocytes and other normal tissues of non-colorectal origin.

[0826] FIG. 28 shows the multivariate test results of the top 12 performing markers using the conservative Bonferroni corrected LogReg test.

[0827] FIG. 29 shows the uncorrected multivariate LogReg test results for each comparison. Each individual genomic region of interest is represented as a point, the dotted line represents the cut off point for the 25% false discovery rate.

[0828] FIG. 30 shows the accuracy of the top 12 performing markers.

[0829] FIG. 31 shows the accuracy of the genewise linear support vector machine cross validation for all genomic regions of each classification.

[0830] The following genomic markers were evaluated as being significant:

[0831] SEQ ID NOS:1-58, and complements thereof.

Normal Tissue Vs. Cell Proliferative Disorder Tissue

[0832] In this classification the gene panel was assessed for its ability to accurately discriminate cell proliferative disorder samples from both colorectal carcinoma, colon polyps and non-colon origin cancers from ‘normal tissues’, namely healthy colon samples, colon tissue of inflammatory disorders, peripheral blood lymphocytes, other normal tissues of non-colorectal origin.

[0833] FIG. 32 shows the multivariate test results of the top 12 performing markers using the conservative Bonferroni corrected LogReg test.

[0834] FIG. 33 shows the uncorrected multivariate LogReg test results for each comparison. Each individual genomic region of interest is represented as a point, the dotted line represents the cut off point for the 25% false discovery rate.

[0835] FIG. 34 shows the accuracy of the top 12 performing markers.

[0836] FIG. 35 shows the accuracy of the genewise linear support vector machine cross validation for all genomic regions of each classification.

[0837] The following genomic markers were evaluated as being significant:

[0838] SEQ ID NOS:1-36, 38-43, 45-49, 51-58, and complements thereof.

Aerodigestive Cancer v. Healthy Aerodigestive Tissues

[0839] In this classification the term ‘aerodigestive’ describes a sample set of tissues consisting lung, liver, pancreas, bile duct, stomach, and colon. FIG. 96 shows a ranked matrices of data obtained according to Examples 1 and 2 according to CpG methylation differences between the two classes of tissues, (Cancerous tissues on the left of the matrix were compared to normal tissues on the right of the matrix.) using an algorithim. The most significant CpG positions are at the bottom of the matrix with significance decreasing towards the top. Red indicates total methylation at a given CpG position, green represents no methylation at the particular position. Each row represents one specific CpG position within a gene and each column shows the methylation profile for the different CpGs for one sample. The following genomic markers were considered significant SEQ ID NOS: 20, 41, 35, 3, 39 & 33.

[0840] The following examples describe the analysis of the methylation status of the genomic sequences SEQ ID NO:35, SEQ ID NO:34, SEQ ID NO:39, SEQ ID NO:29 in healthy and sick colorectal cell proliferative disorder samples. The initial link between said genes and colorectal cell proliferative disorders was initially carried by means of hybridisation analysis as described in EXAMPLE 1. The sequences were then selected from the larger set of genes analysed in said example, and the correlation between methylation status and colorectal cell proliferative disorder states was validated by analysis of samples using other methylation analysis techniques, namely the MSP-MethyLight™ and HeavyMethyl™ MethyLight™ assays. Please note that the term ‘MethyLight™’ is used to describe real time PCR analysis of bisulfite treated DNA using probes of both the Taqman™ (single probe) and Lightcycler™ (dual probe) technologies.

### Example 2

[0841] Analysis of methylation within colon cancer using an MSP-MethyLight assay (SEQ ID NO 35) DNA was extracted from 33 colon adenocarcinoma samples and 43 colon normal adjacent tissues using a Qiagen extraction kit. The DNA from each sample was treated using a bisulfite solution (hydrogen sulfite, disulfite) according to the agarose-bead method (Olek et al 1996). The treatment is such that all non methylated cytosines within the sample are converted to thymidine. Conversely, 5-methylated cytosines within the sample remain unmodified.

[0842] The methylation status was determined with a MSP-MethyLight assay designed for the CpG island of interest and a control fragment from the beta actin gene (Eads et al., 2001). The CpG island assay covers CpG sites in both the primers and the Taqman style probe, while the control gene does not. The control gene is used as a measure of total DNA concentration, and the CpG island assay (methylation assay) determines the methylation levels at that site.

[0843] Methods:

[0844] The SEQ ID NO 35 gene CpG island assay was performed using the following primers and probes:

Forward Primer:
(SEQ ID NO: 14387)
CGGAGGGTACGGAGATTACG;
Reverse Primer:
(SEQ ID NO: 14388)
CGACGACGCGCGAAA;
and
Probe:
(SEQ ID NO: 14389)
CGAAACCCTAAATATCCCGAATAACGCCG.

The corresponding control assay was performed using the following primers and probes:

Primer:
(SEQ ID NO: 14390)
TGGTGATGGAGGAGGTTTAGTAAGT;
Primer:
(SEQ ID NO: 14391)
AACCAATAAAACCTACTCCTCCCTTAA;
and
Probe:
(SEQ ID NO: 14392)
ACCACCACCCAACACACAATAACAAACACA

The reactions were run in triplicate on each DNA sample with the following assay conditions: Reaction solution: (900 nM primers; 300 nM probe; 3.5 mM Magnesium Chloride; 1 unit of taq polymerase; 200 μM dNTPs; 7 μl of DNA, in a final reaction volume of 20 μl); Cycling conditions: (95° C. for 10 minutes; then 50 cycles of: 95° C. for 15 seconds; 60° C. for 1 minute).

[0845] The data was analysed using a PMR calculation previously described in the literature (Eads et al 2001). Results. The mean PMR for normal samples was 0.15, with a standard deviation of 0.18. The mean PMR for tumour samples was 17.98, with a standard deviation of 18.18. The overall difference in methylation levels between tumour and normal samples is significant in a t-test (p=0.00000312). The results are shown in FIG. 36. A Receiver Operating Characteristic curve (ROC curve) of the assay was also determined. A ROC is a plot of the true positive rate against the false positive rate for the different possible cutpoints of a diagnostic test. It shows the tradeoff between sensitivity and specificity depending on the selected cutpoint (any increase in sensitivity will be accompanied by a decrease in specificity). The area under an ROC curve (AUC) is a measure for the accuracy of a diagnostic test (the larger the area the better, optimum is 1, a random test would have a ROC curve lying on the diagonal with an area of 0.5; for reference: J. P. Egan. Signal Detection Theory and ROC Analysis, Academic Press, New York, 1975). The AUC for the MSP-MethylLight™-Assay is: 0.94 (FIG. 37).

### Example 3

[0846] Methylation of SEQ ID NO 35 within colon cancer was analysed using a HeavyMethyl MethyLight™ assay. The same DNA samples were also used to analyse methylation of the CpG island with a HeavyMethyl MethyLight™ (or HM MethyLight™) assay, also referred to as the HeavyMethyl™ assay. The methylation status was determined with a HM MethyLight™ assay designed for the CpG island of interest and the same control gene assay described above. The CpG island assay covers CpG sites in both the blockers and the Taqman™ style probe, while the control gene does not.

[0847] Methods.

[0848] The CpG island assay (methylation assay) was performed using the following primers and probes:

Forward Primer:
(SEQ ID NO: 14393)
GGTGATTGTTTATTGTTATGGTTTG
Reverse Primer:
(SEQ ID NO: 14394)
CCCCTCAACCTAAAAACTACAAC
Forward Blocker:
(SEQ ID NO: 14395)
GTTATGGTTTGTGATTTTGTGTGGG
Reverse Blocker:
(SEQ ID NO: 14396)
AAACTACAACCACTCAAATCAACCCA
Probe:
(SEQ ID NO: 14397)
AAAATTACGACGACGCCACCCGAAA

The reactions were each run in triplicate on each DNA sample with the following assay conditions:

[0849] Reaction Solution:

[0850] (400 nM primers; 400 nM probe; 10 μM both blockers; 3.5 mM magnesium chloride; 1×ABI Taqman buffer; 1 unit of ABI TaqGold polymerase; 20.0 μM dNTPs; and 7 μl of DNA, in a final reaction volume of 20 μl);

[0851] Cycling Conditions:

[0852] (95° C. for 10 minutes); (95° C. for 15 seconds, 64° C. for 1 minute (2 cycles)); (95° C. for 15 seconds, 62° C. for 1 minute (2 cycles); (95° C. for 15 seconds, 60° C. for 1 minute (2 cycles)); and (95° C. for 15 seconds, 58° C. for 1 minute, 60° C. for 40 seconds (41 cycles)).

[0853] Results.

[0854] The mean PMR for normal samples was 1.12 with a standard deviation of 1.45. The mean PMR for tumour samples was 38.23 with a standard deviation of 33.22. The overall difference in methylation levels between tumour and normal samples is significant in a t-test (p=0.000000326). The results are shown in FIG. 36.

[0855] A ROC curve of the assay was also determined. The AUC for the MSP-Methyl-Light-Assay is 0.91 (FIG. 38)

[0856] The assay was tested on an additional set of colon samples (25 adenocarcinoma, 33 normals, and 13 adenomas). The results showed a significant difference again (FIG. 39). The ROC are shown in FIG. 40-42.

[0857] The MSP and HeavyMethyl variants of the MethyLight assay were determined to be equivalent for the analysis of methylation in SEQ ID NO:35. FIG. 48 shows the regression plot of the percentage methylation detected in each sample using the two methods.

### Example 4

[0858] The SEQ ID NO:35-HeavyMethyl-MethyLight-assay was also tested against a panel of other tissues (FIG. 43). Besides the colon cancer samples only one of the two breast cancer tissues were methylated. However, on a panel of 21 additional breast tumours (different stages), only one was methylated (FIG. 44). So the marker is specific for colon tumour samples. All primers, probes, blockers and reaction conditions were identical to those used in the analysis of the colon cancer samples (Example 3).

### Example 5

[0859] Twelve of the colon tissues analysed by real-time PCR also had paired serum taken before surgery. We extracted DNA from 1 ml of that serum using a Qiagen UltraSens □ DNA extraction kit, bisulfite treated the DNA sample, and ran the SEQ ID NO:35-HeavyMethyl-MethyLight™-assay on those samples. The control gene did not amplify for three of the cancer serum samples and three of the normal serum samples, so we can conclude that the sample preparation did not work in these cases. In the other cases, there was evidence of higher methylation in the cancer samples than the normal samples (FIG. 45).

### Example 6

[0860] Analysis of methylation within colon cancer using a SEQ ID NO:34-MSP-MethyLight™ Assay. The colon cancer samples described in Example 2 were also analysed using a SEQ ID NO:34-MSP-MethyLight™ Assay with a Taqman@ style probe. The sample preparation was carried out as described above (Example 1). The assay was performed using the following primers and probes:

Forward Primer:
(SEQ ID NO: 14398)
TGGGATTAAGATTTTCGGTTAGTTTC
Reverse Primer:
(SEQ ID NO: 14399)
CACTACAACGCTACGCGACTAAA
Probe:
(SEQ ID NO: 14400)
TCGACGTTACCCAAACGAATCACATAAAAAAC

The corresponding control assay was performed as described above (EXAMPLE 2)

[0861] The reactions were run in triplicate on each DNA sample with the following assay conditions:

[0862] Reaction Solution:

[0863] (900 nM primers; 300 nM probe; 3.5 mM magnesium chloride; 1 units of taq polymerase; 200 μM dNTPs, 5 M blocker; and 7 μl of DNA, in a final reaction volume of 20 μl);

[0864] Cycling Conditions:

[0865] 95° C. for 10 minutes; (95° C. for 15 seconds, 60° C. for 1 minute) 50 cycles

[0866] The data was analysed using a PMR calculation previously described in the literature (Eads et al 2001).

[0867] Results.

[0868] The results are shown in FIG. 36. The mean PMR for normal samples was 3.93, with a standard deviation of 3.57. The mean PMR for tumour samples was 23.06, with a standard deviation of 20.23 The overall difference in methylation levels between tumour and normal samples is significant in a t-test (p=0.000003063). The ROC curve of the assay is shown in FIG. 46. The AUC is 0.84.

[0869] This was further confirmed using a SEQ ID NO:34-HeavyMethyl MethyLight™ assay, using dual Lightcycler™ probes.

[0870] Methods.

[0871] The CpG island assay (methylation assay) was performed using the following primers and probes:

Forward Primer:
(SEQ ID NO: 14401)
TGGATAGGAGTTGGGATTAAGATTTT
Reverse Primer:
(SEQ ID NO: 14402)
CTTATTACAATTTAAAAAAAAAATTCACTACAA;
Blocker:
(SEQ ID NO: 14403)
AAATTCACTACAACACTACACAACTAAATTCAACATTAC;
Probe:
(SEQ ID NO: 14404)
TTTTCGTATTTTTTTTCGGGTTATTACGTTTT-Fluor;
Probe:
(SEQ ID NO: 14405
LC640-ATGTGATTCGTTTGGGTAACGTCGA-Phos.

The reactions were each run in triplicate on each DNA sample with the following assay conditions:

[0872] Reaction Conditions:

[0873] 500 nM primers; 10 μM blocker; 250 nM probes; 4 mM Magnesium Chloride

[0874] Cycling Profile:

[0875] 95° C. denaturation for 10 minutes; 50 cycles: 95° C. 10 seconds, 57° C. 30 seconds, 72° C. 20 seconds

### Example 7

[0876] Analysis of methylation within colon cancer using a SEQ ID NO:29-MSP-MethyLight™ Assay. The colon cancer samples described in Example 2 were also analysed using a SEQ ID NO:29-MSP-MethyLight™ Assay with a Taqman® style probe. The sample preparation was carried out as described above (Example 2). The assay was performed using the following primers and probes:

Forward Primer:
(SEQ ID NO: 14406)
TTTTTTTTTCGGACGTCGTTG
Reverse Primer:
(SEQ ID NO: 14407)
CCTCTACATACGCCGCGAAT
Probe:
(SEQ ID NO: 14408)
AATTACCGAAAACATCGACCGA

The reactions were run in triplicate on each DNA sample with the following assay conditions:

[0877] Reaction Solution:

[0878] (900 nM primers; 300 nM probe; 3.5 mM magnesium chloride; 1 units of taq polymerase; 200 μM dNTPs, 5 μM blocker; and 7 μl of DNA, in a final reaction volume of 20 μl);

[0879] Cycling Conditions:

[0880] 95° C. for 10 minutes; (95° C. for 15 seconds, 60° C. for 1 minute) 50 cycles

[0881] The corresponding control assay was performed as described above (EXAMPLE 2).

[0882] The data was analysed using a PMR calculation previously described in the literature (Eads et al 2001).

[0883] Results.

[0884] The results are shown in FIG. 36. The mean PMR for normal samples was 3.04, with a standard deviation of 4.21. The mean PMR for tumour samples was 21.38, with a standard deviation of 24.08 The overall difference in methylation levels between tumour and normal samples is significant in a t-test (p=0.0000101973). The ROC curve of the assay is shown in FIG. 47. The AUC is 0.80.

[0885] This was further confirmed using a SEQ ID NO:29-HeavyMethyl MethyLight™ assay (using dual labeled Lightcycler™ probes.

[0886] Methods.

[0887] The CpG island assay (methylation assay) was performed using the following primers and probes:

Forward Primer:
(SEQ ID NO: 14409)
GTAGGGTTATTGTTTGGGTTAATAAAT
Reverse Primer:
(SEQ ID NO: 14410)
TAAAAAAAAAAAAAAAACTCCTCTACATAC
Blocker:
(SEQ ID NO: 14411)
AACTCCTCTACATACACCACAAATAAATT
Probe:
(SEQ ID NO: 14412)
CGAAAACATCGACCGAACAACG-Fluor
Probe:
(SEQ ID NO: 14413)
LC640-GTCCGAAAAAAAAAAAACGAACTCC-Phos

[0888] The reactions were each run in triplicate on each DNA sample with the following assay conditions:

[0889] Reaction Conditions:

[0890] Forward primer: 600 nM; Reverse primer: 30 nM; Blocker: 10 μM; Probes: 500 nM; Taq polymerase: 0.1 U/μl; dNTPs: 0.2 mM each; Magnesium Chloride: 4 mM; BSA: 0.25 mg/ml; Roche buffer with no MgCl₂: 1×

[0891] Cycling Conditions:

[0892] 95° C. denaturation for 10 minutes; 50 cycles: 95° C. for 10 seconds, 57° C. for 25 seconds, 72° C. for 10 seconds

### Example 8

[0893] Analysis of methylation within colon cancer using a SEQ ID NO:29-MSP-MethyLight™ Assay. An additional assay for SEQ ID NO:29 was tested on colon samples. The assay was tested on two sets of tissues, each with 12 colon a denocarcinomas and 12 normal adjacent tissue samples.

[0894] The sample preparation was carried out as described above (Example 2). The assay was performed using the following primers and probes:

Forward Primer:
(SEQ ID NO: 14414)
GGACGTTTTTTATCGAAGGCG
Reverse Primer:
(SEQ ID NO: 14415)
GCCACCCAACCGCGA
Probe:
(SEQ ID NO: 14416)
ACCCGAAATCACGCGCGAAAAA

[0895] The reactions were run in triplicate on each DNA sample with the following assay conditions:

[0896] Reaction Solution:

[0897] (900 nM primers; 300 nM probe; 3.5 mM magnesium chloride; 1 units of taq polymerase; 200 μM dNTPs, 5 μM blocker; and 7 μl of DNA, in a final reaction volume of 20 μl);

[0898] Cycling Conditions:

[0899] 95° C. for 10 minutes; (95° C. for 15 seconds, 60° C. for 1 minute) 50 cycles. The corresponding control assay was performed as described above (Example 2)

[0900] The data was analysed using a PMR calculation previously described in the literature (Eads et al 2001). In both cases, SEQ ID NO:29 was significantly more methylated in the cancer samples. The ROC curves of the assays are shown in FIGS. 49 and 50. The AUC are 0.93 and 1.

### Example 9

[0901] Analysis of methylation within colon cancer using a SEQ ID NO:39-MSP-MethyLight™ Assay

[0902] The colon cancer samples described in Example 2 were also analysed using a SEQ ID NO:39-MSP-MethyLight™ Assay. The sample preparation was carried out as described above (EXAMPLE 2). The assay was performed using the following primers and probes:

Forward Primer:
(SEQ ID NO: 14417)
GACGGATTTTTTTTTAACGTTTTTTC
Reverse Primer:
(SEQ ID NO: 14418)
AAATAAAATACCACCTCCGCGA
Probe:
(SEQ ID NO: 14419)
GCTCCTCGCGAAATACTCACCCCG

[0903] The reactions were run in triplicate on each DNA sample with the following assay conditions:

[0904] Reaction Solution:

[0905] (900 nM primers; 300 nM probe; 3.5 mM magnesium chloride; 1 units of taq polymerase; 200 μM dNTPs, 5 μM blocker; and 7 μl of DNA, in a final reaction volume of 20 μl);

[0906] Cycling Conditions:

[0907] 95° C. for 10 minutes; (95° C. for 15 seconds, 60° C. for 1 minute) 50 cycles.

[0908] The corresponding control assay was performed as described above (EXAMPLE 2).

[0909] The data was analysed using a PMR calculation previously described in the literature (Eads et al 2001).

[0910] Results.

[0911] The results are shown in FIG. 36. The mean PMR for normal samples was 2.25, with a standard deviation of 2.42. The mean PMR for tumour samples was 25.67, with a standard deviation of 17.57 The overall difference in methylation levels between tumour and normal samples is significant in a t-test (p=0.00000000118). The ROC curve of the assay is shown in FIG. 52. The AUC is 0.94

[0912] This was further confirmed using a SEQ ID NO:39-HeavyMethyl MethyLight™ assay, using dual Lightcycler probes using Lightcycler style dual probe technology.

[0913] Methods.

[0914] The CpG island assay (methylation assay) was performed using the following primers and probes:

Forward Primer:
(SEQ ID NO: 14420)
GTTAGTTAGTTAATTTTTTAAATAGATTAGTAG
Reverse Primer:
(SEQ ID NO: 14421)
CAAAAAAACAAATAAAATACCACCTCC
Blocker:
(SEQ ID NO: 14422)
CCTCCACAAAACTCACTCCTCACAAAATAC
Probe:
(SEQ ID NO: 14423)
red640 TTTCGTTTTGTATGGTAGATACGGGGTGA-phosphate
Probe:
(SEQ ID NO: 14424)
ATTAATGGTTTTATAAGACGGATTTTTTTTTAACGT-fluorescine

[0915] The reactions were each run in triplicate on each DNA sample with the following assay conditions:

[0916] Reaction Conditions:

[0917] Forward primer: 600 nM; Reverse primer: 300 nM; Blocker: 10 M; Probes: 500 nM; Taq polymerase: 0.1 U/μl; dNTPs: 0.2 mM each; Magnesium Chloride: 4 mM; BSA: 0.25 mg/ml; Roche buffer with no MgCl₂: 1×

[0918] Cycling Conditions:

[0919] 95° C. denaturation for 10 minutes; 50 cycles: 95° C. for 10 seconds, 57° C. for 25 seconds, 72° C. for 10 seconds.

### Experiment 10: Stool Analysis of Methylation Markers

[0920] The following experiments were run in order to establish the feasibility of methylation markers (for the detection of colon cell proliferative disorders) from DNA derived from stool samples. Accordingly, a series of samples were prepared each comprising either stool only (control) or stool with the addition of a controlled amount of cells from the colon cancer cell line SW 620 (25,000 cell equivalent−0.15 ug) the prepared samples were then frozen. Three different stool samples were used. As a positive control a further sample was prepared comprising peripheral blood lymphocytes (PBLs) and a controlled amount of cells from the colon cancer cell line.

[0921] The Samples were as Follows:

Class 1: Stool sample No. 1
Class 2: Stool sample No. 1+0.15 ug
Class 3: Stool sample No. 2
Class 4: Stool sample No. 2+0.15 ug
Class 5: Stool sample No. 3
Class 6: Stool sample No. 3+0.15 ug
Class 7: PBS+25,000 cell equivalents (0.15 ug)

### Class 8: H₂O

[0922] Multiple samples were prepared in each class. 300 ng of stool DNA was present in each sample. Each sample was then analysed for methylation using an MSP TaqMan assay for the gene EPHB65 as follows:

Primer Forward:
(SEQ ID NO: 14455)
TTTTTTTTTCGGACGTCGTTG
Primer Reverse:
(SEQ ID NO: 14456)
CCTCTACATACGCCGCGAAT
Probe:
(SEQ ID NO: 14457)
AATTACCGAAAACATCGACCGA

Cycling Conditions were: The Reaction Conditions for TaqMan:

| | | |
|---|---|---|
| Initial denaturation | 95° C. | 10 min |
| Denaturation | 95° C. | 15 sec |
| Annealing/Extension | 60° C. | 60 sec |

50 cycles

[0923] Amplification curves of the PCR reaction were according to FIGS. 52 to 58.

### Class 1: FIG. 52

### Class 2: FIG. 53

### Class 3: FIG. 54

### Class 4: FIG. 55

### Class 5: FIG. 56

[0924] Class 6: Not applicable (see below)

### Class 7: FIG. 57

### Class 8: FIG. 58

[0925] The X-axis shows the cycle number of the polymerase chain reaction, the Y-axis shows the delta Rn, which is the fluorescence intensity over background, the horizontal line (A) represents the threshold level of the calibration curve (B), if the curve reaches above (A) methylation has been detected.

[0926] As can be seen, methylated colon cancer DNA could be detected in classes 2 & 5. Class 6 was not analysed as methylated DNA was detected in the stool sample (class 5).

[0927] In order to determine the absolute sensitivity of methylated DNA detection in stool samples stool sample No. 2 was spiked with varying amounts of SW 620 DNA. Five classes of samples were analysed using the MSP assays above:
[0928] Class B: 25,000 cell equivalents in 250 mg stool
[0929] Class C: 2,500 cell equivalents in 250 mg stool
[0930] Class D: 250 cell equivalents in 250 mg stool
[0931] Class E: 25 cell equivalents in 250 mg stool
[0932] Class F: 0 cell equivalents in 250 mg stool

[0933] The amplification curves can be seen in FIG. 59. The X-axis shows the cycle number of the polymerase chain reaction, the Y-axis shows the delta Rn, which is the fluorescence intensity over background, the horizontal line (A) represents the threshold level of the calibration curves (B-F), if the curves reach above (A) methylation has been detected. Curves B, C, D; E; & F are the amplification curves of classes B, C, D, E & F respectively. Thus it can be seen that methylated DNA can be detected in stool samples at levels of 25 cells per 250 mg stool.

### Example 11

### Real Time Analysis of Methylation Sensitive Restriction.

[0934] DNA was prepared from ten colon tumor samples and ten normal adjacent tissue samples. DNA isolation was performed using standard methods known to the expert and quantified by UV measurement.

[0935] A digestion reaction was performed with the following reagents:

1 μg genomic DNA;
25 U enzyme (10 U/μl);

### Y+/Tango Buffer

[0936] By incubation 37° C.

[0937] The following steps were performed for all samples in parallel. 1 μg of DNA was dissolved in 190 μl Y+/Tango Buffer (Fermentas) in 0.2 ml PCR tubes. 95 μl of the reaction solution (half of the overall volume) was pipetted into a clean PCR tube as a control. To the remaining reagent in the first tube 1.25 μl HpaII and 1.25 μl Hin6I restriction endunuclease (both from Fermentas) were added.

[0938] To the second tube 2.5 μl of a mixture of glycerol and water (v:v=1:1) was added. After incubating all 40 tubes at 37° C. in an Eppendorff Thermocycler for five hours. Then another aliquot of restriction enzyme, resp. water-glycerol mix, was added to each tube and the incubation was extended for ten hours. After this period of time the restriction enzymes were inactivated by heating at 65° C. for 10 minutes.

[0939] Subsequently, dilutions of each tube were assembled in 96 well plates by transferring 20 μl from each tube into the plates and adding 80 μl water.

[0940] Finally, both the restriction product and the control of each sample were analyzed by Quantitative Real Time PCR. In this example 12 μl of a SybrGreen containing PCR mastermix containing one of the primers according to table 4 was pipetted into a 96 well Taqman plate followed by 8 μl of the corresponding dilutions of restricted sample and blank (each in duplicate).

[0941] Real Time PCR was performed on a ABI 7700 instrument applying the following temperature profile: 15 minutes at 95° C.; 50 cycles of: 15 seconds at 95° C., 45 seconds at 65° C., 75 seconds at 72° C.; 15 seconds at 95° C. followed by 50° C. for one hour.

[0942] Using the described primers and conditions amplification is observed only for methylated copies of the analysed sequences (according to table 4) when methylation sensitive restriction has been performed prior to PCR, since unmethylated copies are digested during this step. The amount of methylated DNA after restriction is normalized against the total amount of DNA present before the restriction as obtained by Real Time quantitation of the blank of the same sample. The equation

ΔCt=Ct_{blank}−Ct_{restricted} 1

represents a measure for the relative amount of unmethylated DNA present in a DNA sample. A value of zero means that the DNA is completely methylated. A value of 0.5 corresponds to approximately 50% methylation in case of an optimised PCR reactions whereas larger values correspond to low methylation levels. The relative amount of methylated sequence present in a sample would be given by

M=E^{-ΔCt} (2)

where E is the PCR efficiency. The PCR efficiency is easily obtained by methods known to the expert.

TABLE 4

| | | | Results |
|---|---|---|---|
| Gene | Forward primer | Reverse Primer | FIG. |
| SEQ | GACGGGGGTTCTGGACTTAC | CCAGTCCCTGGATGTTGCT | 60 |
| ID | (SEQ ID NO: 14458) | (SEQ ID NO: 14459) | |
| NO: 8 | | | |
| SEQ | GCTAAGCCGGAGTCACCAAG | CGCTGAGACCGAGAAGAAG | 61 |
| ID | (SEQ ID NO: 14460) | (SEQ ID NO: 14461) | |
| NO: 5 | | | |
| SEQ | GCCGACGAGACCAAGGAG | ATGAGCAGCGTGAAGACGA | 62 |
| ID | (SEQ ID NO: 14462) | (SEQ ID NO: 14463) | |
| NO: 10 | | | |
| SEQ | CGTGCCATCCCAAGAGTTT | ATGACCCTGGCTTTGGTGT | 63 |
| ID | (SEQ ID NO: 14464) | (SEQ ID NO: 14465) | |
| NO: 62 | | | |
| SEQ | CGCAGTAAGAGGCGACAAC | AAGGGGTCTACGGGCACT | 64 |
| ID | (SEQ ID NO: 14466) | (SEQ ID NO: 14467) | |
| NO: 12 | | | |
| SEQ | TCTGGAAGGAGGACGTGAA | AAGGGGTCTACGGGCACT | 65 |
| ID | (SEQ ID NO: 14468) | (SEQ ID NO: 14469) | |
| NO: 11 | | | |
| SEQ | GTTGAAGTCGCCCAGGAAC | AGTGGGGCACCGACGTAA | 66 |
| ID | (SEQ ID NO: 14470) | (SEQ ID NO: 14471) | |
| NO: 61 | | | |
| SEQ | CCATTTTACTTGGGGTGTGG | CTGGAGCTGTCAGGAGAAAAG | 67 |
| ID | (SEQ ID NO: 14472) | (SEQ ID NO: 14473) | |
| NO: 46 | | | |
| SEQ | GTCGCCCCCTACCCTTCT | CCCAAGACCTTAACCCAAGTC | 68 |
| ID | (SEQ ID NO: 14474) | (SEQ ID NO: 14475) | |
| NO: 64 | | | |
| SEQ | CTCCAAACGCGATACCCTCT | GTGACTCCTCCCCTTCCTTC | 69 |
| ID | (SEQ ID NO: 14476) | (SEQ ID NO: 14477) | |
| NO: 63 | | | |
| SEQ | GCCTTAACTGCTGGGGTCTT | GATGGAGATGGCTGAAGTGG | 70 |
| ID | (SEQ ID NO: 14478) | (SEQ ID NO: 14479) | |
| NO: 20 | | | |
| SEQ | GTCCATCGGTTTCGTCTCC | CCACCGTGTAGAAGTTGTCGT | 71 |
| ID | (SEQ ID NO: 14480) | (SEQ ID NO: 14481) | |
| NO: 45 | | | |

[0943] Results are shown in FIGS. 60-71. Each individual sample is annotated on the x-axis as ‘n’ denoting normal, or ‘t’ denoting tumour. A bronchial tissue sample was accidentally analysed in some assays, these are annotated with an arrow, and are irrelevant in the context of the present invention. The Y-axis shows the level of methylation (‘methylation rate’) in the sample. The methylation rate {methylated/(methylated+unmethylated) are shown for the fragments corresponding to the primer pairs in Table 4. Formula (2) above was used for the calculation assuming a PCR efficiency of E=2.

[0944] The data demonstrate that for several fragments the majority of the tumor samples show significantly higher methylation rates than the corresponding normal adjacent tissues.

### Example 12

### mRNA Expression Analysis

### 1. RNA Samples

[0945] Total RNA from normal colon (n=1) and colon cancer (adenocarcinoma; n=1) was obtained from Ambion (Huntingdon, United Kingdom). Each RNA sample was derived from a single donor. Total cellular RNA was prepared using the ToTALLY RNA Kit (Ambion, Huntingdon, United Kingdom) and Dnase-treatment was performed to minimize contamination. RNA integrity was assessed before and after 14 hours incubation at 37° C. on an Agilent Bioanalyzer (Agilent Technologies, Inc, Palo Alto, Calif.).

### 2. Microarray Experiments

[0946] Target preparation and labeling, microarray hybridization, washing, and scanning was performed according to the manufacturer's protocol (Affymetrix, Inc., Santa Clara, Calif.). Briefly, 10 μg of total RNA were reverse transcribed using a T7-linked oligo-dT primer, followed by second strand synthesis. Biotin-labeled cRNA targets were prepared from double stranded cDNA using T7 RNA polymerase and biotinylated ribonucleotides (UTP, CTP). Fragmentation was performed at 94° C. for 35 minutes. 15 μg of the fragmented biotinylated cRNA were mixed with MES buffer (2-(N-Morpholino)ethanesulfonic acid) containing 0.5 mg/ml acetylated bovine serum albumin and hybridised to Affymetrix GeneChip HG_U133A arrays (Santa Clara, Calif.) for 16 hours at 45° C. Microarrays were stained using streptavidin phycoerythrin conjugates (Molecular Probes, Inc., Eugene, Oreg.). For signal amplification biotinylated anti-streptavidin antibodies (Vector Laboratories, Burlingame, Calif.) were used.

[0947] Arrays were scanned on an Affymetrix GeneChip Scanner. The expression values for each probe set (representing a gene) were calculated from the raw data using Bioconductor R packages (http://www.bioconductor.org, see below).

### 3. Data Analysis

[0948] The raw expression data obtained from the Affymetrix scanner (the so called cel-files) were background corrected and normalized using the default settings of the RMA normalization procedure (Irizarry R A, Hobbs B, Collin F, Beazer-Barclay Y D, Antonellis K J, Scherf U, Speed TP: Exploration, normalization, and summaries of high density oligonucleotide array probe level data. Biostatistics. 2003 April; 4(2):249-64) as implemented in the Bioconductor R packages, release 1.4 (Gautier L, Cope L, Bolstad B M, Irizarry RA: affy—analysis of Affymetrix GeneChip data at the probe level. Bioinformatics. 2004 Feb. 12; 20(3):307-150). The raw data processing results in signal intensity values for each of the 22.293 probe sets available on the Affymetrix GeneChip HG_U133A chip.

[0949] To identify differentially expressed probe sets, the fold change of the normalized signal intensities between colon normal tissue and colon tumour tissue was calculated. Genes with a fold change bigger than 2 (or smaller than 0.5) were identified as differentially expressed.

[0950] Differentially expressed genes are shown in Table 5, as can be seen hypermethylation does not correlate with underexpression in all cases.

TABLE 5

| | Gene | | | |
|---|---|---|---|---|
| | SEQ | | | |
| Affymetrix | ID | log-fold | fold- | up/down in |
| Probe ID | NO: | change | change | cancer |
| 208944_at | 37 | −1.0 | 2.0 | down |
| 209945_s_at | 27 | 1.2 | 2.3 | up |
| 214211_at | 54 | −1.3 | 2.5 | down |
| 203140_at | 16 | −1.8 | 3.4 | down |
| SEQ ID | 15 | −1.4 | 2.6 | down |
| NO: | | | | |
| 3497_at | | | | |

### Example 13

### TPEF(TMEFF2) Methylation Analysis in Serum Samples

[0951] In the following example 3 different sample sets of serum from colorectal cancer patients and healthy colon individuals were analysed using MSP assay ‘4’ and HM assay ‘6’ of the gene TMEFF2. Healthy colon was defined as being verified by colonoscopy as having no colon malignancy or polyps present. The assays were run on the LightCycler platform (Roche Diagnostics), using two different versions of the instrument for comparative purposes, namely versions ‘1.2’ and ‘2.0’. They are referred to below as ‘LC 1.2’ and ‘LC 2.0’ respectively.

### Sample Sets

### Sample Set One:

[0952] 30 colorectal cancers, 30 colonoscopy verified as no colon malignancy or polyps Sample set two:

[0953] 15 colorectal cancers, 15 colonoscopy verified as no colon malignancy or polyps Sample set three:

[0954] 30 colorectal cancers, 30 colonoscopy verified as no colon malignancy or polyps In each case approximately 1.8 mls of serum equivalent was analysed per PCR.

### Reaction Conditions

[0955] Assay ‘4’ was performed as below.
Forward primer: agggcgttttgttggcg (SEQ ID NO:14482)
Reverse Primer: ctacaacctaaacgacgcgct (SEQ ID NO:14483)
Taqman Probe: atcggcgttttagcgtgcggg (FAM/BHQ1 labelled) (SEQ ID NO: 14484)

### Lightcycler Program:

| | | | |
|---|---|---|---|
| activation: | 95° 10 mins | | |
| 3 cycles | 95° 15 secs | (20°/sec) | |
| | 66° 45 secs | (20°/sec) | detection |
| 3 cycles | 95° 15 secs | (20°/sec) | |
| | 64° 45 secs | (20°/sec) | detection |
| 50 cycles | 95° 15 secs | (20°/sec) | |
| | 62° 45 secs | (20°/sec) | detection |

### Results

### Assay ‘4’

### Sample Set One:

[0957] AUC=0.95 [0.86, 0.99] (95% confidence intervals) LC 2.0

### Sample Set Two:

### AUC=0.65 [0.44, 0.80] LC 2.0

### AUC=0.57 [0.37, 0.75] LC 1.2

### Sample Set Three:

### AUC=0.83 [0.71, 0.92] LC 2.0

### AUC=0.83 [0.71, 0.92] LC 1.2

### Assay ‘6’

Forward primer:
(SEQ ID NO: 14485)
aaaaaaaaaaaactcctctacatac
Reverse Primer:
(SEQ ID NO: 14486)
ggttattgtttgggttaataaatg
Blocker oligonucleotide:
(SEQ ID NO: 14487)
acatacaccacaaataaattaccaaaaacatcaaccaa-pho
Probes:
(SEQ ID NO: 14488)
ttttttttttcggacgtcgtt-fluo
and
(SEQ ID NO: 14489)
red640-tcggtcgatgttttcggtaa-pho

LightCycler 1.2 program:

| | | | | |
|---|---|---|---|---|
| activation: | 95° C. | 10 min | | |
| 55 cycles: | 95° C. | 10 sec | (20° C./s) | |
| | 56° C. | 30 sec | (20° C./s) | detection |
| | 72° C. | 10 sec | (20° C./s) | |

### Sample Set Two:

[0959] AUC=0.70 [0.51, 0.85] LC 2.0

### Sample Set Three:

[0960] AUC=0.69 [0.55, 0.80] LC 2.0

[0961] AUC=0.71 [0.53, 0.83] LC 1.2 (Some samples were lost, approximately 20 cancer serum samples, 20 healthy colon serum samples were analysed)

### Example 14

### MSP Analysis of the Genes According to Table 6 (Below)

[0962] In the following analysis the methylation status of a selection of the genes according to Table 3 were analysed by means of methylation specific amplification using the primers according to Table 6 (below).

[0963] The study was run on approximately 140 samples from colon, breast and liver carcinoma, normal tissue (peripheral blood lymphocytes, healthy colon and healthy tissue adjacent to colon carcinoma), colon polyps and other colon diseases. The positive class consisted of Colon Cancer and Colon polyps. The negative class was PBL (peripheral blood lymphocytes), Colon-Normal, Colon-NAT and Colon-Inflammatory. For AUC values in brackets (see table 7, below) Breast-Cancer and Liver-Cancer were also included in the negative class.

[0964] Genomic DNA was analyzed using the MSP technique after bisulfite conversion. Total genomic DNA of all samples was bisulfite treated converting unmethylated cytosines to uracil. Methylated cytosines remained conserved. Bisulfite treatment was performed with minor modifications according to the protocol described in Olek et al. (1996).

[0965] The sequence of interest was then amplified by means of methylation specific primers, the amplificate is then detected by means of methylation specific Taqman probes.

TABLE 6
Oligonucleotides for MSP Taqman.

| Assay | | | | Reverse primer | Amplification |
|---|---|---|---|---|---|
| number | Gene/Genomic location | Forward primer sequence | Probe | sequence | curve |
| 1 | Transcription | Acggcgttttggttcgt | cgacttaataac | gtcatctaacaa | FIG. 72 |
| | factor BTF3 | | gacgtacgcga | cgacctaactaa | |
| | Homolog 1 | | accc | cg | |
| 2 | RING FINGER | ctctaaaccgcgaaaactccg | cgcgtttgtt | gggatgaga | FIG. 73 |
| | PROTEIN 4 | | cgggtttcggg | ggttgttgacgttc | |
| 3 | TUMOR NECROSIS | agggcgttttgttggcg | atcggcgtttta | ctacaacctaaacg | FIG. 74 |
| | FACTOR RECEPTOR | | gcgtgcggg | acgcgct | |
| | SUPERFAMILY | | | | |
| | MEMBER 16 | | | | |
| | PRECURSOR | | | | |
| 4 | Region of | gaggtttcggttcgaggttc | acgtcacaaaaa | ctttactacaacg | FIG. 75 |
| | chromosome | | aaaaacccacgt | aaaacgccg | |
| | 14q31.1 | | aataataacgaa | | |
| 5 | Chondroitin | gattaaaaaatttgtttttattc | cgcggaagtaga | tccgcttcgaaaacc | FIG. 76 |
| | sulfate | ggtcg | gtaggcgggcg | tcga | |
| | proteoglycan 2 | | | | |
| | (versican) | | | | |
| | (CPSG2) | | | | |
| 6 | EYA 4 | caaaatccgtcgacgataaaac | tcgggttgggg | acgtagttatag | FIG. 77 |
| | | | ttcgtattcgg | gttttgatagttttaggga | |
| 7 | MOTHERS AGAINST | gaacgcgaaaaaattaacatct | tttcgtttttat | tttcgggattgttgt | FIG. 78 |
| | DECAPENTAPLEGIC | cg | cgtggtgggtat | tggtgttt | |
| | HOMOLOG 7 | | gttcgtgttta | | |
| | (SMAD 7) | | | | |
| 8 | ENDOPLASMIN | catcaatatcctaatcataacc | taggtttagtcg | gagatggggaatttt | FIG. 79 |
| | PRECURSOR (94 | tactatctatcg | cgcgttcgcga | ttgacgtc | |
| | KDA GLUCOSE- | | | | |
| | REGULATED PROTEIN) | | | | |
| | (GRP94) (GP96 | | | | |
| | HOMOLOG) (TUMOR | | | | |
| | REJECTION | | | | |
| | ANTIGEN 1) | | | | |
| 9 | Region of | cttaaaataata | cgaaaaacgat | tttgcggaaagacgtcgtt | FIG. 80 |
| | chromosome 6q25.1 | acgcgaaatataacgct | cgaaatcccga | | |
| | | | ctttc | | |
| 10 | B-CELL LYMPHOMA 6 | ccaaaaatacgcgaccacg | ctaaaccactaa | cgttttttcgtattcggaa | FIG. 81 |
| | PROTEIN (BCL-6)(ZINC | | tattcgacgtaa | agac | |
| | FINGER PROTEIN 51) | | ttctccgtattt | | |
| | (LAZ-3 PROTEIN) | | ac | | |
| | (BCL-5) | | | | |
| 11 | HOMEOBOX PROTEIN | tacgtgtgaggggttcgc | ccatcgaaacta | ccaataaaaattc | FIG. 82 |
| | ARISTALESS-LIKE 4 | | tccaaatacgata | gtaaaaaaaaacg | |
| | | | accga | | |
| 12 | TRANSMEMBRANE | cggttagtcggaggcgc | cgaacgaaacaa | ccaaaataaccaatcgac | FIG. 83 |
| | PROTEIN WITH EGF- | | cctaaacgaaaa | ccg | |
| | LIKE AND TWO | | ccccg | | |
| | FOLLISTATIN-LIKE | | | | |
| | DOMAINS 2 | | | | |
| 13 | Hypothetical | gggattaagattttcggt | caaacgaatcac | aacgctacgcgactaaat | FIG. 84 |
| | protein-leucine | tagtttcg | ataaaaaacgta | tcga | |
| | rich repeat | | ataacccgaa | | |
| 14 | Candidate tumor | gggttagggtgggtcgc | cgtcggcgtggg | gactcccgccccaacg | FIG. 85 |
| | suppressor 8p22 | | cgatgtc | | |
| 15 | VESICULAR INHIBITORY | cggagggtacggagattacg | cgaaaccctaaa | cgacgacgcgcgaaa | FIG. 86 |
| | AMINO ACID | | tatcccgaataa | | |
| | TRANSPORTER | | cgccg | | |
| | (GABA AND GLYCINE | | | | |
| | TRANSPORTER) | | | | |
| | (VESICULAR GABA | | | | |
| | TRANSPORTER) | | | | |
| | (HVIAAT) | | | | |

Reaction Conditions for Taqman PCR program:
Denaturation at 95° C. for 10 minutes.
50 cycles: Denaturation at 95° C. for 15 seconds.
[0966] Annealing at 62° C. for 1 minute. Except Assay15, which has an annealing temp of 60° C.
   Amplification curves for each assay are shown in FIGS. 72 to 86 (according to Table 6).

### The Technical Performance of a Series of Alternative Assays was Validated by Testing Each of the Following Using Sperm DNA as the Template:

Gene SEQ ID NO: 34 (MSP assay)
Primers:
(SEQ ID NO: 14535)
cgtacgaacgcaacaaccg
&
(SEQ ID NO: 14536)
gttcggcgttgtttaggc
Probes:
(SEQ ID NO: 14537)
gcatcttccaacaccgtcccg-fluo
&
(SEQ ID NO: 14538)
LC640-ctccgcatccttccccgaa-p
(Lightcycler probes)

### Lightcycler Program:

[0968] 95°10 mins

[0969] 55 cycles 95°15 secs (20°/sec)

[0970] 62°45 secs (20°/sec) detection

[0971] 72°15 secs (20°/sec)

Gene SEQ ID NO: 28 (MSP assay)
Primers:
(SEQ ID NO: 14539)
ccgaacaaacgtaatacgcg
&
(SEQ ID NO: 14540)
acggcgtgaaggagcg
Probes:
(SEQ ID NO: 14541)
tacgcgcggtagtcgtgcgc
(Taqman probe FAM/BHQ1 labelled)

### Lightcycler Program:

[0972] 95°10 mins

[0973] 55 cycles95°15 secs (20°/sec)

[0974] 60°45 secs (20°/sec) detection

Gene SEQ ID NO: 10 (MSP assay)
Primers:
(SEQ ID NO: 14542)
cgacaaaatcctcatcgcg
&
(SEQ ID NO: 14543)
gtcgtttagcgttgggaagc
Probes:
(SEQ ID NO: 14544)
tacgtacgagtttcgtacgcgtattatttcgtcg
(Taqman probe FAM/BHQ1 labelled)

### Lightcycler Program:

| | | | |
|---|---|---|---|
| | 95° 10 mins | | |
| 55 cycles | 95° 15 secs | (20°/sec) | |
| | 62° 45 secs | (20°/sec) | detection |

Gene SEQ ID NO: 9 (MSP assay)
Primers:
(SEQ ID NO: 14545)
acttaaaaatcgccgaatcg
&
(SEQ ID NO: 14546)
agttttatagttaattagggtagttgtcgtcg
Probes:
(SEQ ID NO: 14547)
tcctatcatcgctcacgaacg-fluo
&
(SEQ ID NO: 14548)
LC640-cgacaacgactatccttactattataa-p
(Lightcycler probes)

### LC Program:

| | | | |
|---|---|---|---|
| | 95° 10 mins | | |
| 55 cycles | 95° 15 secs | (20°/sec) | |
| | 60° 30 secs | (20°/sec) | detection |
| | 72° 15 secs | (20°/sec) | |

Gene SEQ ID NO: 17 (HeavyMethyl ™ assay)

| | | | |
|---|---|---|---|
| Primer: | | | |
| Ggtgttgtttattttagagagtt (SEQ ID NO: 14549) | | | |
| Cctaacccctatccttc (SEQ ID NO: 14550) | | | |
| blocker: | | | |
| ccttcaccaccttcccaacactacaacac-pho (SEQ ID NO: 14551) | | | |
| probes: | | | |
| tcggcgtcggtcgttagg-fluo (SEQ ID NO: 14552) | | | |
| red640-cgcgggagtagttagatgcgtc-pho (SEQ ID NO: 14553) | | | |
| LightCycler program: | | | |
| activation: | 95° C. | 10 min | |
| 55 cycles: | 95° C. | 10 sec | (20° C./s) |
| | 56° C. | 30 sec | (20° C./s) |
| | 72° C. | 10 sec | (20° C./s) |
| melting curve: | 95° C. | 10 sec | 20 |
| | 40° C. | 10 sec | 20 |
| | 70° C. | 10 sec | 0, 1 |
| cooling: | 40° C. | 5 sec | |

Gene SEQ ID NO: 7 (HeavyMethyl ™ assay)

| | | | | |
|---|---|---|---|---|
| Primer: | | | | |
| Tgagagagagagggttgaaa (SEQ ID NO: 14554) | | | | |
| Tctaaataacaaaatacctccatt (SEQ ID NO: 14555) | | | | |
| probes: | | | | |
| CGaccCGccaacCGac-fluo (SEQ ID NO: 14556) | | | | |
| LCred640-CGcCGaaaCGCGctc-p (SEQ ID NO: 114557) | | | | |
| blocker: | | | | |
| ccattaccaacacaacccaccaaccaa-p (SEQ ID NO: 14558) | | | | |
| LightCycler program: | | | | |
| (activation: | 95° C. | 10 min | | |
| 55 cycles: | 95° C. | 10 sec | (20° C./s) | |
| | 56° C. | 30 sec | (20° C./s) | detection |
| | 72° C. | 10 sec | (20° C./s) | |
| melting curve: | 95° C. | 10 sec | 20 | |
| | 40° C. | 10 sec | 20 | |
| | 70° C. | 0 sec | 0, 1 | |
| cooling: | 40° C. | 5 sec | | |

Gene SEQ ID NO: 8 (HeavyMethyl ™ assays)

| | | | | |
|---|---|---|---|---|
| primer: | | | | |
| Aaaaaaaaaaaactcctctacatac (SEQ ID NO: 14559) | | | | |
| Ggttattgtttgggttaataaatg (SEQ ID NO: 14560) | | | | |
| blocker: | | | | |
| acatacaccacaaataaattaccaaaaacatcaaccaa-pho | | | | |
| (SEQ ID NO: 14561) | | | | |
| probes: | | | | |
| ttttttttttcggacgtcgtt-fluo (SEQ ID NO: 14562) | | | | |
| red640-tcggtcgatgttttcggtaa-pho (SEQ ID NO: 14563) | | | | |
| LightCycler program: | | | | |
| activation: | 95° C. | 10 min | | |
| 55 cycles: | 95° C. | 10 sec | (20° C./s) | |
| | 56° C. | 130 sec | (20° C./s) | detection |
| | 72° C. | 110 sec | (20° C./s) | |
| Melting curve: | 95° C. | 110 sec | 120 | |
| | 40° C. | 10 sec | 120 | |
| | 70° C. | 0 sec | 10, 1 | |
| cooling: | 40° C. | 5 sec | | |
| primer: | | | | |
| Aaaaaaaaaaaactcctctacatac (SEQ ID NO: 14564) | | | | |
| Ggttattgtttgggttaataaatg (SEQ ID NO: 14565) | | | | |
| blocker: | | | | |
| ctctacataCAcCACAaataaattacCAaaaacatC-p | | | | |
| (SEQ ID NO: 14566) | | | | |
| probes: | | | | |
| CGCGaataaattacCGaaaacatc-fluo (SEQ ID NO: 14567) | | | | |
| LCred640-accgaacaacgacgtcc-p (SEQ ID NO: 14568) | | | | |
| LightCycler program: | | | | |
| activation: | 95° C. | 10 min | | |
| 55 cycles: | 95° C. | 10 sec | (20° C./s) | detection |
| | 56° C. | 30 sec | (20° C./s) | |
| | 72° C. | 10 sec | (20° C./s) | |
| melting curve: | 95° C. | 10 sec | 20 | |
| | 40° C. | 10 sec | 20 | |
| | 70° C. | 0 sec | 0, 1 | |
| cooling: | 40° C. | 5 sec | | |
| primer: | | | | |
| gaggtgttagaggagtagtag (SEQ ID NO: 14569) | | | | |
| Tccccctacaacctaaa (SEQ ID NO: 14570) | | | | |
| blocker: | | | | |
| Acctaaacaacacactcccacacactaaaacaccaat | | | | |
| (SEQ ID NO: 114571) | | | | |
| probes: | | | | |
| Cgagtcggcgcggga-fluo (SEQ ID NO: 14572) | | | | |
| Lcred640-agggcgttttgttggcgatc-p (SEQ ID NO: 14573) | | | | |
| LightCycler program: | | | | |
| activation: | 95° C. | 10 min | | |
| 55 cycles: | 95° C. | 10 sec | (20° C./s) | |
| | 58° C. | 30 sec | (20° C./s) | detection |
| | 72° C. | 10 sec | (20° C./s) | |
| melting curve: | 95° C. | 10 sec | 20 | |
| | 40° C. | 10 sec | 20 | |
| | 70° C. | 0 sec | 0, 1 | |
| cooling: | 40° C. | 5 sec | | |

Gene SEQ ID NO: 9 (HeavyMethyl ™ assays)

| | | | | |
|---|---|---|---|---|
| Primer: | | | | |
| ctatccatatacctaactaattaataac (SEQ ID NO: 14574) | | | | |
| gtaaagtttttaatttttattagtattagtat (SEQ ID NO: 14575) | | | | |
| Blocker | | | | |
| ctaattaataacacttaaaacacaattataaacaccaccatac-pho | | | | |
| (SEQ ID NO: 14576) | | | | |
| Probe: | | | | |
| Red640-atttagttaaagthatgtcgattatagttacgttagttt-pho | | | | |
| (SEQ ID NO: 14577) | | | | |
| gtgaacggtttcgtcgggag-fluo (SEQ ID NO: 14578) | | | | |
| LightCycler program: | | | | |
| activation: | 95° C. | 10 min | | |
| 55 cycles: | 95° C. | 10 sec | (20° C./s) | |
| | 56° C. | 30 sec | (20° C./s) | detection |
| | 72° C. | 10 sec | (20° C./s) | |
| melting curve: | 95° C. | 10 sec | 20 | |
| | 40° C. | 10 sec | 20 | |
| | 70° C. | 0 sec | 0, 1 | |
| cooling: | 40° C. | 5 sec | | |
| Primer: | | | | |
| gttttattgtatgatgaattgga (SEQ ID NO: 14579) | | | | |
| caccaaaaaaatattaaccac (SEQ ID NO: 14580) | | | | |
| Blocker: | | | | |
| Ttaaccacaacacaaataaaaccaaacaaattatccata-pho | | | | |
| (SEQ ID NO: 14581) | | | | |
| Probe: | | | | |
| Gttttttcgcgttcgtcgtttatttt-fluo (SEQ ID NO: 14582) | | | | |
| Red640-ttgggtcgacgagattaaggagg-pho (SEQ ID NO: 14583) | | | | |
| LightCycler program: | | | | |
| activation: | 95° C. | 10 min | | |
| 55 cycles: | 95° C. | 10 sec | (20° C./s) | detection |
| | 56° C. | 30 sec | (20° C./s) | |
| | 72° C. | 10 sec | (20° C./s) | |
| melting curve: | 95° C. | 10 sec | 20 | |
| | 40° C. | 10 sec | 20 | |
| | 70° C. | 0 sec | 0, 1 | |
| cooling: | 40° C. | 5 sec | | |

Gene SEQ ID NO: 5 (HeavyMethy ™ assay)

| | | | | |
|---|---|---|---|---|
| primer: | | | | |
| Gagaggtttattaaggtaggg (SEQ ID NO: 14584) | | | | |
| Ctactaccaaaaataaaaaattattaac (SEQ ID NO: 14585) | | | | |
| blocker: | | | | |
| Aaaattattaacatccaacacatttatccaaacttcaaa | | | | |
| (SEQ ID NO: 14586) | | | | |
| probes: | | | | |
| gtttaggggtttgtagagaagttcga-fluo (SEQ ID NO: 14587) | | | | |
| red640-tcggataaacgcgtcgg-pho (SEQ ID NO: 14588) | | | | |
| LightCycler program: | | | | |
| activation: | 95° C. | 10 min | | |
| 55 cycles: | 95° C. | 10 sec | (20° C./s) | |
| | 56° C. | 30 sec | (20° C./s) | detection |
| | 72° C. | 110 sec | (20° C./s) | |
| melting curve: | 95° C. | 10 sec | 20 | |
| | 40° C. | 10 sec | 20 | |
| | 70° C. | 10 sec | 0, 1 | |
| cooling: | 40° C. | 5 sec | | |

Gene 6480 (HeavyMethyl ™ assay)

| Primer: | | | | |
|---|---|---|---|---|
| gagttgagagaatttttaaatttt (SEQ ID NO: 14589) | | | | |
| Tcttataaaacaaaaaacacc (SEQ ID NO: 14590) | | | | |
| Blocker: | | | | |
| Caccactacaatccaaacaacccaaa-pho (SEQ ID NO: 14591) | | | | |
| Probes: | | | | |
| Ggacgtcgagcgttgggtat-fluo (SEQ ID NO: 114592) | | | | |
| (Red640-aggacgcgtagttggacggt-pho (SEQ ID NO: 14593) | | | | |
| LightCycler program: | | | | |
| activation: | 95° C. | 10 min | | |
| 55 cycles: | 95° C. | 10 sec | (20° C./s) | |
| | 56° C. | 30 sec | (20° C./s) | detection |
| | 72° C. | 10 sec | (20° C./s) | |
| melting curve: | 95° C. | 10 sec | 20 | |
| | 40° C. | 10 sec | 20 | |
| | 70° C. | 10 sec | 0, 1 | |
| cooling: | 40° C. | 5 sec | | |
| Gene SEQ ID NO: 28 (HeavyMethyl ™ assay) | | | | |
| primer: | | | | |
| Gaaggaagggaaagtttt (SEQ ID NO: 14594) | | | | |
| Taaaaaaaacactaccctac (SEQ ID NO: 14595) | | | | |
| Blocker: | | | | |
| ctaccacaataaaaacccaaaacactccttcacacca-p | | | | |
| (SEQ ID NO: 14596) | | | | |
| Probe | | | | |
| acccgaaacgctccttcacg-fluo (SEQ ID NO: 14597) | | | | |
| red640-cgtaaacaaacgaaacgacgactacg-Pho | | | | |
| (SEQ ID NO: 14598) | | | | |
| LC program Roche: | | | | |
| denat at 95° C. | | | | |
| 95° C. | 10 min | | | |
| 55 cycles: | | | | |
| denat at 95° C. | 10 sec | (20° C./s) | | |
| annealing 56° C. | 30 sec | (20° C./s) | detection | |
| extension 72° C. | 10 sec | (20° C./s) | | |
| melting | | | | |
| 95° C. | 10 sec | 20 | | |
| 135° C. | 20 sec | 20 | | |
| 195° C. | 0 sec | 0, 1 | | |

Gene SEQ ID NO: 1 (HeavyMethyl ™ assay)

| | | | | |
|---|---|---|---|---|
| oligos: | | | | |
| Primer: | | | | |
| Cacaaactatctataaaaaattaatctc (SEQ ID NO: 14599) | | | | |
| Gattgttgttggtgtttgttatt (SEQ ID NO: 14600) | | | | |
| Blocker: | | | | |
| ctcaaacacaaaaaaattaacatctcatctcttaaaccactttcaat-pho | | | | |
| (SEQ ID NO: 14601) | | | | |
| Probes: | | | | |
| TCgTCTCTTAAACCgCTTTCgA-fluo (SEQ ID NO: 114602) | | | | |
| Red640-CCTCAAAATAAACACgAACATACCC-pho | | | | |
| (SEQ ID NO: 14603) | | | | |
| LightCycler program: | | | | |
| activation: | 95° C. | 10 min | | |
| 55 cycles: | 95° C. | 10 sec | (20° C./s) | |
| | 56° C. | 30 sec | (20° C./s) | detection |
| | 72° C. | 10 sec | (20° C./s) | |
| melting curve: | 95° C. | 10 sec | 20 | |
| | 40° C. | 10 sec | 20 | |
| | 70° C. | 0 sec | 0, 1 | |
| cooling: | 40° C. | 5 sec | | |

Gene SEQ ID NO: 34 (HeavyMethyl ™ assay)

| | | | | |
|---|---|---|---|---|
| Primer: | | | | |
| Atacaaaatacaaaaataccttct (SEQ ID NO: 14604) | | | | |
| Atttggttttattttggttatg (SEQ ID NO: 14605) | | | | |
| Blocker: | | | | |
| accttctcacaaatcaactaaaacacacacaacacc-pho | | | | |
| (SEQ ID NO: 14606) | | | | |
| Probes: | | | | |
| LCRed640-tggatttagggcgtcgcg-pho (SEQ ID NO: 114607) | | | | |
| cgttcgtttattaagcggcga-fluo (SEQ ID NO: 14608) | | | | |
| LightCycler program: | | | | |
| activation: | 95° C. | 10 min | | |
| 55 cycles: | 95° C. | 10 sec | (20° C./s) | |
| | 56° C. | 30 sec | (20° C./s) | detection |
| | 72° C. | 10 sec | (20° C./s) | |
| melting curve: | 95° C. | 10 sec | 20 | |
| | 40° C. | 10 sec | 20 | |
| | 70° C. | 0 sec | 0, 1 | |
| cooling: | 40° C. | 5 sec | | |

### Results

[0977] Sensitivity and specificity were computed with SVM and 10 fold cross validation

TABLE 7

| Gene/Genomic | | | |
|---|---|---|---|
| location | AUC | Sensitivity | Specificity |
| Transcription | 0.57 | 0.15 | 0.99 |
| factor BTF3 Homolog 1 | (0.56) | | |
| RING FINGER PROTEIN 4 | 0.54 | 0.91 | 0.09 |
| | (0.55) | | |
| TUMOR NECROSIS | 0.82 | 0.74 | 0.90 |
| FACTOR RECEPTOR | (0.82) | | |
| SUPERFAMILY MEMBER | | | |
| 16 PRECURSOR | | | |
| Region of | 0.83 | 0.69 | 0.94 |
| chromosome 14q31.1 | (0.84) | | |
| Chondroitin sulfate | 0.92 | 0.83 | 0.96 |
| proteoglycan 2 | (0.88) | | |
| (versican) (CPSG2) | | | |
| EYA 4 | 0.83 | 0.71 | 0.94 |
| | (0.84) | | |
| MOTHERS AGAINST | 0.54 | 0.25 | 0.91 |
| DECAPENTAPLEGIC | (0.52) | | |
| HOMOLOG 7 (SMAD 7) | | | |
| ENDOPLASMIN | 0.6 | 0.11 | 0.99 |
| PRECURSOR (94 KDA | (0.6) | | |
| GLUCOSE-REGULATED | | | |
| PROTEIN) (GRP94) | | | |
| (GP96 HOMOLOG) | | | |
| (TUMOR REJECTION | | | |
| ANTIGEN 1) | | | |
| Region of | 0.59 | 0.1 | 0.99 |
| chromosome 6q25.1 | (0.57) | | |
| B-CELL LYMPHOMA 6 | 0.62 | 0.11 | 0.98 |
| PROTEIN (BCL-6) | (0.62) | | |
| (ZINC FINGER | | | |
| PROTEIN 51) (LAZ-3 | | | |
| PROTEIN) (BCL-5) | | | |
| HOMEOBOX PROTEIN | 0.78 | 0.74 | 0.95 |
| ARISTALESS-LIKE 4 | (0.75) | | |
| TRANSMEMBRANE | 0.88 | 0.84 | 0.94 |
| PROTEIN WITH EGF- | (0.88) | | |
| LIKE AND TWO | | | |
| FOLLISTATIN-LIKE | | | |
| DOMAINS 2 | | | |
| Hypothetical | 0.73 | 0.79 | 0.38 |
| protein-leucine | (0.72) | | |
| rich repeat | | | |
| Candidate tumor | 0.79 | 0.64 | 0.76 |
| suppressor 8p22 | (0.84) | | |
| VESICULAR | 0.77 | 0.78 | 0.44 |
| INHIBITORY AMINO | (0.77) | | |
| ACID TRANSPORTER | | | |
| (GABA AND GLYCINE | | | |
| TRANSPORTER) | | | |
| (VESICULAR GABA | | | |
| TRANSPORTER) | | | |
| (HVIAAT) | | | |

Sensitivity and specificity of multiple gene (panel) assays.

### Panel: Assay 9, Assay 12

### Sensitivity: 0.88421052631579

### Specificity: 0.972972972972973

### Panel: Assay 11, Assay 12

### Sensitivity: 0.88421052631579

### Specificity: 0.97027027027027

### Panel: Assay 12, Assay 15

### Sensitivity: 0.9

### Specificity: 0.95

### Panel: Assay 6, Assay 7

### Sensitivity: 0.87

### Specificity: 0.973333333333333

### Panel: Assay 5, Assay 11

### Sensitivity: 0.894736842105263

### Specificity: 0.941333333333333

### Panel: Assay 5, Assay 7

### Sensitivity: 0.894736842105263

### Specificity: 0.938666666666667

### Panel: Assay 4, Assay 6

### Sensitivity: 0.857894736842105

### Specificity: 0.971428571428571

### Panel: Assay 7, Assay 12

### Sensitivity: 0.905263SEQ ID NO: 94737

### Specificity: 0.921621621621622

### Panel: Assay 6, Assay 12

### Sensitivity: 0.842105263SEQ ID NO: 95

### Specificity: 0.978378378378378

### Panel: Assay 5, Assay 9

### Sensitivity: 0.842105263SEQ ID NO: 95

### Specificity: 0.973333333333333

### Panel: Assay 3, Assay 15

### Sensitivity: 0.857142857142857

### Specificity: 0.953424657534247

### Panel: Assay 1, Assay 12

### Sensitivity: 0.842105263SEQ ID NO: 95

### Specificity: 0.967567567567568

### Panel: Assay 5, Assay 15

### Sensitivity: 0.857142857142857

### Specificity: 0.945205479452055

### Panel: SEQ ID NO: 17.2, Assay 5

### Sensitivity: 0.81764705882353

### Specificity: 0.966233766233766

### Panel: Assay 3, Assay 12

### Sensitivity: 0.8

### Specificity: 0.983783783783784

### Panel: Assay 6, Assay 11

### Sensitivity: 0.83SEQ ID NO: 947368421

### Specificity: 0.952

### Panel: Assay 5, Assay 12

### Sensitivity: 0.8105263SEQ ID NO: 9474

### Specificity: 0.972972972972973

### Panel: Assay 3, Assay 11

### Sensitivity: 0.83SEQ ID NO: 947368421

### Specificity: 0.949333333333333

### Panel: Assay 3, Assay 5

### Sensitivity: 0.823529411764706

### Specificity: 0.955844155844156

### Panel: Assay 3, SEQ ID NO: 17.2

### Sensitivity: 0.8

### Specificity: 0.974025974025974

### Class Prediction by Supervised Learning

[0978] In order to give a reliable estimate of how well the CpG ensemble of a selected marker set can differentiate between different tissue classes we determined its prediction accuracy by classification. For that purpose we calculated a methylation profile based prediction function. This step is called training and it exploits the prior knowledge represented by the data labels. The prediction accuracy of that function is then tested by cross-validation or on a set of independent samples. As a method of choice, we used the support vector machine (SVM) algorithm (Duda (2001), Christiannini (2000)) to learn the prediction function. If not stated otherwise, for this report the risk associated with false positive or false negative classifications are set to be equal relative to the respective class sizes. It follows that the learning algorithm obtains a class prediction function with the objective to optimize accuracy on an independent test sample set. Therefore sensitivity and specificity of the resulting classifier can be expected to be approximately equal. FIGS. 87 to 95 show the performance of quadratic SVMs trained on the full data set using the following assays.

### FIG. 87: Assays 12 and 9

### FIG. 88: Assays 12 and 11

### FIG. 89: Assays 12 and 15

### FIG. 90: Assays 7 and 6

### FIG. 91: Assays 11 and 5

### FIG. 92: Assays 7 and 5

### FIG. 93: Assays 6 and 4

### FIG. 94: Assays 12 and 7

### FIG. 95: Assays 12 and 6

### Example 15

### HeavyMethyl Analysis

[0979] In the following, methylation of the genes/genomic sequences according to Gene SEQ ID Nos: 7, 8 & 17 was analysed in 15 colorectal cancer samples (referred to as ‘colon’ in Table 7), and eight peripheral blood lymphocyte samples referred to as ‘PBL’ in Table 7).

[0980] Total genomic DNA of all samples was bisulfite treated converting unmethylated cytosines to uracil. Methylated cytosines remained conserved. Bisulfite treatment was performed with minor modifications according to the protocol described in Olek et al. (1996).

[0981] The sequence of interest was then amplified by means of primers specific for bisulfite treated DNA and a blocking oligonucleotide (in order to suppress amplification of non-methylated DNA). The 3′OH terminus of the blocking oligonucleotide was “capped” by a phosphate group to prevent polymerase from extending the primer during PCR reaction. The amplificate is then detected by means of methylation specific LightCycler™ probes, wherein one probe was labelled with 5′red 640 and had a capped 3′OH terminus and the other was labelled with 3′Fluorescein.

Genomic SEQ ID NO:8
Primers:
(SEQ ID NO: 14609)
aaaaaaaaaaaactcctctacatac
&
(SEQ ID NO: 14610)
ggttattgtttgggttaataaatg
Blocking oligonucleotide:
(SEQ ID NO: 14611 + 14612)
acatacaccacaaataaattaccaaaaacatcaaccaa
Probes:
(SEQ ID NO: 14613)
ttttttttttcggacgtcgtt
(Fluorescein) &
(SEQ ID NO: 14614)
tcggtcgatgttttcggtaa
(red640)
Genomic SEQ ID NO:7
Primers:
(SEQ ID NO: 14615)
ggtttgggatggttgt
&
(SEQ lD NO: 14616)
tctaaataacaaaatacctccatt
Blocking oligonucleotides:
(SEQ ID NO: 14617)
ccattaccaacacaacccaccaaccaa
Probes:
(SEQ ID NO: 14618)
ggtcgcggtgagagagagag
(Fluorescein) &
(SEQ ID NO: 14619)
tgaaattagagcgcgtttcgg
(red640)
Genomic SEQ ID NO: 17
Primers:
(SEQ ID NO: 14620)
ggtgttgtttattttagagagtt
&
(SEQ ID NO: 14621)
cctaacccctatccttc
Blocking oligonucleotides:
(SEQ ID NO: 14622)
ccttcaccaccttcccaacactacaacac
Probes:
(SEQ ID NO: 14623)
tggggtttcggcgaagtaa
(Fluorescein) &
(SEQ ID NO: 14624)
tttttcggcgtoggtcgt
(red640)

[0982] The reactions were performed in a total volume of 20 μl using a LightCycler device (Roche Diagnostics). The real time PCR reaction mix contained 10 μl of template DNA, 2 μl of FastStart LightCycler reaction mix for hybridization probes (Roche Diagnostics, Penzberg),

TABLE 7
Results of HeavyMethyl assays

| | | | | Calculated | |
|---|---|---|---|---|---|
| | | | | Concentration | |
| | | | | DNA | |
| | | | | undiluted | |
| | Crossing points | | Crossing points | (pg/10 μl) | |
| | Genomic | Genomic | Genomic | Genomic SEQ | |
| | SEQ ID | SEQ ID | SEQ ID NO: 4 | ID NO: 4 | |
| Tissue | NO: 3 | NO: 12 | (undiluted) | (diluted) | |
| Colon | 36.73 | 38.22 | 39.58 | | 5.855 |
| Colon | 33.1 | >51 | | | 386.9 |
| Colon | 39.8 | 42.84 | | | 57.5 |
| Colon | 39.74 | 38.75 | 32.54 | 33.89 | 482.6 |
| Colon | | >51 | | | 132.55 |
| Colon | | 38.82 | | | 29.955 |
| Colon | 32.08 | 33.9 | 33.43 | 35.43 | 816 |
| Colon | 37.03 | 36.91 | | | 284.35 |
| Colon | 38.07 | 46.54 | | | 0 |
| Colon | 35.22 | 37.81 | 36.8 | 37.03 | 298.35 |
| Colon | 33.66 | 36.19 | 33.23 | 34.01 | 1355 |
| Colon | 36.78 | 37.46 | 40.71 | | 879 |
| Colon | | 37.23 | | | 57.5 |
| Colon | | | | | 1669 |
| Colon | 34.88 | 34.71 | 34.21 | 34.49 | 880.5 |
| PBL | | | | | 716.5 |
| PBL | | | | | 796 |
| PBL | | | | | 584.5 |
| PBL | 38.55 | | | | 1813 |
| PBL | | | | | 5470 |
| PBL | | 49.04 | | | 761 |
| PBL | | | | | 625 |
| PBL | | 39.75 | | | 9835 |
| M 100 pg | 36.34 | 37.29 | 34.95 | 34.51 | 583.5 |
| M 100 pg | 36.06 | 37.86 | 34.64 | 34.09 | 428.3 |
| uMRoche | | 34.48 | | | |
| 100 ng | | | | | |
| uMPhi | | | | | |
| 100 ng | | | | | |
| water | | | | | |

Bold type figures indicate those classified as positive because the amplification curves were flat.

### Example 15

### Serum Analysis of the Genes According to SEQ ID Nos: 7, 30, 28 &8

[0983] The assays as described above in example 13 (MSP) & 14 (HeavyMethyl) were then applied to a set of serum samples consisting 32 colorectal carcinoma serum samples, and compared to a set consisting of 54 normal serum samples, 11 serum samples from benign colon lesions and 6 serum samples from inflammatory colon disease. 130 μl of serum was used per assay and the results were quantitatively reported as positive or negative.

TABLE 6

| Marker or | | |
|---|---|---|
| combination of | | |
| markers | Sensitivity | Specificity |
| SEQ ID NO: 8 | 25 | 92.9 |
| (HeavyMethyl) | | |
| SEQ ID NO: 8 (MSP) | 40.6 | 94.3 |
| SEQ ID NO: 30 (MSP) | 21.9 | 97.1 |
| SEQ ID NO: 28 (MSP) | 37.5 | 77.6 |
| SEQ ID NO: 7 (MSP) | 15.6 | 98.3 |
| SEQ ID NO: 8, 8 & 30 | 50 | 95.7 |
| SEQ ID NO: 8, 30 & | 59.4 | 78.9 |
| 28 | | |

### FURTHER TABLES

TABLE 1

| | | Ampli- |
|---|---|---|
| | | ficate |
| Gene: | Primer: | Length: |
| (SEQ ID NO: 16) | TTGGAGTTAAAGTATTTGGTAAGA | 442 |
| | (SEQ ID NO: 536) | |
| | AAAACCACCTTCAAACCC | |
| | (SEQ ID NO: 537) | |
| (SEQ ID NO: 4) | ATCCTCCACACTCTTCCTCTAT | 140 |
| | (SEQ ID NO: 538) | |
| | GAAATTAGGTTTGGTTTTGTTT | |
| | (SEQ ID NO: 539) | |
| (SEQ ID NO: 4) | GAGATTTTGGGAGGGGTAG | 486 |
| | (SEQ ID NO: 540) | |
| | AACTCTATCCTTTTCCCTCTTC | |
| | (SEQ ID NO: 541) | |
| (SEQ ID NO: 56) | TGTTGGTTGTTGTTGTTGTT | 319 |
| | (SEQ ID NO: 542) | |
| | CTTTCTACCCATCCCAAAA | |
| | (SEQ ID NO: 543) | |
| (SEQ ID NO: 27) | TAAGTGATAAAGGAAGGAAGGA | 243 |
| | (SEQ ID NO: 544) | |
| | CCTTCAAACCCCAAACAA | |
| | (SEQ ID NO: 545) | |
| (SEQ ID NO: 31) | TTGTTGTTTTTAGGGGTTTTGG | 947 |
| | (SEQ ID NO: 546) | |
| | TCCTTCCCATTCTCCAAATATC | |
| | (SEQ ID NO: 547) | |
| (SEO ID NO: 32) | TCAACTACCATCAACTTCCTTA | 491 |
| | (SEQ ID NO: 548) | |
| | AATTTATTTTTAGTGTTGTAGTGGG | |
| | (SEQ ID NO: 549) | |
| (SEQ ID NO: 33) | GAAAGGAGAGGTTAAAGGTTG | 696 |
| | (SEQ ID NO: 550) | |
| | AACTCACTTAACTCCAATCCC | |
| | (SEQ ID NO: 551) | |
| (SEQ ID NO: 34) | GGATAGGAGTTGGGATTAAGAT | 414 |
| | (SEQ ID NO: 552) | |
| | AAATCTTTTTCAACACCAAAAT | |
| | (SEQ ID NO: 553) | |
| (SEQ ID NO: 24) | TCCAATAAACACAAACCTAAATC | 471 |
| | (SEQ ID NO: 554) | |
| | ATATGGGATTGATGGAAGATAG | |
| | (SEQ ID NO: 555) | |
| (SEQ ID NO: 35) | GGAAGAGGTGATTAAATGGAT | 226 |
| | (SEQ ID NO: 556) | |
| | CCCAAAAATCAAACAACAA | |
| | (SEQ ID NO: 557) | |
| (SEQ ID NO: 57) | ATTTGGGAAAGAGGGAAAG | 300 |
| | (SEQ ID NO: 558) | |
| | TAAAAACTCTAAACCCCATCC | |
| | (SEQ ID NO: 559) | |
| (SEQ ID NO: 25) | CCCTACCCACCAATATACC | 278 |
| | (SEQ ID NO: 560) | |
| | AGATTTGGGGAAGAAGTTGTA | |
| | (SEQ ID NO: 561) | |
| (SEQ ID NO: 36) | TAAAAGAAGGATTTTTGATTGG | 528 |
| | (SEQ ID NO: 562) | |
| | CATCTTATTTACCTCCCTCCC | |
| | (SEQ ID NO: 563) | |
| (SEQ ID NO: 28) | TTTTAGATTGAGGTTTTAGGGT | 497 |
| | (SEQ ID NO: 564) | |
| | ATCCATTCTACCTCCTTTTTCT | |
| | (SEQ ID NO: 565) | |
| (SEQ ID NO: 37) | GTAATTTGAAGAAAGTTGAGGG | 296 |
| | (SEQ ID NO: 566) | |
| | CCAACAACTAAACAAAACCTCT | |
| | (SEQ ID NO: 567) | |
| (SEQ ID NO: 26) | AGTAAATAGTGGGTGAGTTATGAA | 607 |
| | (SEQ ID NO: 568) | |
| | GAAAAACCTCTAAAAACTACTCTCC | |
| | (SEQ ID NO: 569) | |
| (SEQ ID NO: 38) | GTTAGTATGTTTGGGGGTAAAT | 435 |
| | (SEQ ID NO: 570) | |
| | ATAAATAACACCTTCCACCCTA | |
| | (SEQ ID NO: 571) | |
| (SEQ ID NO: 39) | TTTGTATTAGGTTGGAAGTGGT | 286 |
| | (SEQ ID NO: 572) | |
| | CCCAAATAAATCAACAACAACA | |
| | (SEQ ID NO: 573) | |
| (SEQ ID NO: 29) | TTGTTTGGGTTAATAAATGGA | 295 |
| | (SEQ ID NO: 574) | |
| | CTTCTCTCTTCTCCCCTCTC | |
| | (SEQ ID NO: 575) | |
| (SEQ ID NO: 40) | AATATAGGGAGGTTTAGGGTTT | 424 |
| | (SEQ ID NO: 576) | |
| | TAACCATACATTTCTCATCCAA | |
| | (SEQ ID NO: 577) | |
| (SEQ ID NO: 41) | TTTTGGGGAATATAGGGTTT | 425 |
| | (SEQ ID NO: 578) | |
| | TTCTCACATTTCTAACCACTTCT | |
| | (SEQ ID NO: 579) | |
| (SEQ ID NO: 5) | CTCCTCCTTCCAACAAAAA | 487 |
| | (SEQ ID NO: 580) | |
| | GTTTAGAGGTTTTGGGATGATT | |
| | (SEQ ID NO: 581) | |
| (SEQ ID NO: 5) | TGAATAGGGTGATATTTTAGTTAGG | 497 |
| | (SEQ ID NO: 582) | |
| | ATAAATCATCCCAAAACCTCTA | |
| | (SEQ ID NO: 583) | |
| (SEQ ID NO: 6) | ATTTGGTTATTGGTTGAAGGTA | 361 |
| | (SEQ ID NO: 584) | |
| | AATTTTTAATTTCTCAACACCTCT | |
| | (SEQ ID NO: 585) | |
| (SEQ ID NO: 6) | GAAGAGGTGTTGAGAAATTAAAA | 462 |
| | (SEQ ID NO: 586) | |
| | CCCACCCTAACTTACCATAAA | |
| | (SEQ ID NO: 587) | |
| (SEQ ID NO: 8) | CAATTCCCCTTATTTCTCTAAA | 339 |
| | (SEQ ID NO: 588) | |
| | AATTAGTTATGGTGTTGTGGGA | |
| | (SEQ ID NO: 589) | |
| (SEQ ID NO: 8) | TTCTATTAAAACCCAACTCCTC | 395 |
| | (SEQ ID NO: 590) | |
| | ATAAGGGGAATTGTTGTAGGTT | |
| | (SEQ ID NO: 591) | |
| (SEQ ID NO: 42) | TACCATTCTTTCCTAAACATCC | 148 |
| | (SEQ ID NO: 592) | |
| | GGGTTGGTGGAGAGGTAG | |
| | (SEQ ID NO: 593) | |
| (SEQ ID NO: 14) | GAAGATGAGAGGAGGTTGAGA | 500 |
| | (SEQ ID NO: 594) | |
| | CCACACCACCTACTACAAAAT | |
| | (SEQ ID NO: 595) | |
| (SEQ ID NO: 15) | AACAAACCTCCTCCAAATTC | 365 |
| | (SEQ ID NO: 596) | |
| | TGTTGGTAGGTATTGGTGATT | |
| | (SEQ ID NO: 597) | |
| (SEQ ID NO: 15) | TCCCCACTTAAAATAAACAAAT | 375 |
| | (SEQ ID NO: 598) | |
| | GTGAATTTGGAGGAGGTTT | |
| | (SEQ ID NO: 599) | |
| (SEQ ID NO: 7) | GGGGTTGATATTGTTTTTAGAG | 328 |
| | (SEQ ID NO: 600) | |
| | CCCCTCCTTCCTTAAATCT | |
| | (SEQ ID NO: 601) | |
| (SEQ ID NO: 44) | TTTTAGAAGGGGTTGGTTTAG | 343 |
| | (SEQ ID NO: 602) | |
| | ACTACCTAACTCTCCCCACAA | |
| | (SEQ ID NO: 603) | |
| (SEQ ID NO: 44) | TTGTGGGGAGAGTTAGGTAGT | 411 |
| | (SEQ ID NO: 604) | |
| | TAACCCAAATATCATAAAACCC | |
| | (SEQ ID NO: 605) | |
| (SEQ ID NO: 1) | AGATGGATATTTTGTTGGTGTT | 250 |
| | (SEQ ID NO: 606) | |
| | TACACAATTATACCTTTCAAACAAT | |
| | (SEQ ID NO: 607) | |
| (SEQ ID NO: 1) | CCATACAAATATCCTAAATAAAACC | 482 |
| | (SEQ ID NO: 608) | |
| | TTGTTGGAAGAATTGATAGTGTT | |
| | (SEQ ID NO: 609) | |
| (SEQ ID NO: 1) | AGGGAGTTAAGTAAGGGGTTAG | 442 |
| | (SEQ ID NO: 610) | |
| | AACACCAACAAAATATCCATCT | |
| | (SEQ ID NO: 611) | |
| (SEQ ID NO: 2) | TGGAATTTTAGGGTTAGTAGGG | 499 |
| | (SEQ ID NO: 612) | |
| | CAAATAAACCAAACCACTATCA | |
| | (SEQ ID NO: 613) | |
| (SEQ ID NO: 2) | TTGGGATTTTTAGGTGGTTT | 492 |
| | (SEQ ID NO: 614) | |
| | TTCACTTTCCCTACTAACCCTA | |
| | (SEQ ID NO: 615) | |
| (SEQ ID NO: 45) | TGGGTTATTTGGTGAGTATTGT | 461 |
| | (SEQ ID NO: 616) | |
| | CTTACCCCCACCCAACTA | |
| | (SEQ ID NO: 617) | |
| (SEQ ID NO: 46) | TTCACATTACATTAACCCATTTA | 452 |
| | (SEQ ID NO: 618) | |
| | TTGGAGTTGTTAGGAGAAAAGT | |
| | (SEQ ID NO: 619) | |
| (SEQ ID NO: 10) | CCTTCCTTAAAAACCTCAAAAC | 436 |
| | (SEQ ID NO: 620) | |
| | GTAAAGAATGGTAGAGGATAGGAT | |
| | (SEQ ID NO: 621) | |
| (SEQ ID NO: 10) | CTTACTACCCAACCTCTTTCAC | 444 |
| | (SEQ ID NO: 622) | |
| | TGGAAGGATAGAGAATTTTGTT | |
| | (SEQ ID NO: 623) | |
| (SEQ ID NO: 11) | ATCCCATCTCTCAACTCCTACT | 452 |
| | (SEQ ID NO: 624) | |
| | TGATTTATTTTGATGTGTGGTT | |
| | (SEQ ID NO: 625) | |
| (SEQ ID NO: 11) | TATTTAAGGATTTTGGAAGGAG | 349 |
| | (SEQ ID NO: 626) | |
| | TCATCTCATTTTATCTCTACAACC | |
| | (SEQ ID NO: 627) | |
| (SEQ ID NO: 13) | AACAAATTCCCAACACACC | 476 |
| | (SEQ ID NO: 628) | |
| | TTTTGGAAGATGGTTTATTTTT | |
| | (SEQ ID NO: 629) | |
| (SEQ ID NO: 13) | TTTTTAATATGGAGGTAAGGGA | 279 |
| | (SEQ ID NO: 630) | |
| | AAATTCCCAACACACCAAC | |
| | (SEQ ID NO: 631) | |
| (SEQ ID NO: 3) | CTTCTCCAAAATCAACCAACT | 254 |
| | (SEQ ID NO: 632) | |
| | TTTGTGTTATTAGTAGGTGAGAGG | |
| | (SEQ ID NO: 633) | |
| (SEQ ID NO: 3) | TTAGAAGTTGGAGGGTGAAAT | 450 |
| | (SEQ ID NO: 634) | |
| | CTTCCTACCTTAAACCCTTACC | |
| | (SEQ ID NO: 635) | |
| (SEQ ID NO: 18) | TCTAACTCCTCACAAATTCCTAA | 498 |
| | (SEQ ID NO: 636) | |
| | GTAGTGTAATAGGGAAAGGGG | |
| | (SEQ ID NO: 637) | |
| (SEQ ID NO: 48) | TAAAATTCCCTCTTACCCTAAA | 396 |
| | (SEQ ID NO: 638) | |
| | TAGTAAGGATTGTAGAAGGGGG | |
| | (SEQ ID NO: 639) | |
| (SEQ ID NO: 48) | TAGTAAGGATTGTAGAAGGGGG | |
| | (SEQ ID NO: 640) | |
| | CCTCAAACCCTAAAAATAACC | |
| | (SEQ ID NO: 641) | |
| (SEQ ID NO: 58) | GGAGAGGAGTGTTTGTAGAAGA | 369 |
| | (SEQ ID NO: 642) | |
| | CAATCTCCCCTAAATCCTAAT | |
| | (SEQ ID NO: 643) | |
| (SEQ ID NO: 22) | TAGTAGTTTGAAGAAGGGGAAG | 373 |
| | (SEQ ID NO: 644) | |
| | AAACATTCCTAAAATCACAAAAA | |
| | (SEQ ID NO: 645) | |
| (SEQ ID NO: 19) | TTTATTTGGGTATGATTAGGTTTT | 426 |
| | (SEQ ID NO: 646) | |
| | ACTAAAAACACCACCCCCT | |
| | (SEQ ID NO: 647) | |
| (SEQ ID NO: 19) | ACAAACCAAAATCTTACTTCCTA | 458 |
| | (SEQ ID NO: 648) | |
| | GAATGGAGGGGAAATGTTA | |
| | (SEQ ID NO: 649) | |
| (SEQ ID NO: 17) | AAAACTCCTCCCCTCTATAAAT | 492 |
| | (SEQ ID NO: 650) | |
| | TTGGAGAGATGTGTTGGTTAG | |
| | (SEQ ID NO: 651) | |
| (SEQ ID NO: 17) | AATCCTAACCAACACATCTCTC | 482 |
| | (SEQ ID NO: 652) | |
| | AGGGGATTTTAAGGTGATTAGT | |
| | (SEQ ID NO: 653) | |
| (SEQ ID NO: 23) | CTCCCCATCCATCTTATTTTA | 489 |
| | (SEQ ID NO: 654) | |
| | ATTGTTTGGGTGATAGTGAAGT | |
| | (SEQ ID NO: 655) | |
| (SEQ ID NO: 21) | TAAGTTTTTGGAGGAAGAGTTT | 370 |
| | (SEQ ID NO: 656) | |
| | AAAATACTCCCTATAATTCCCC | |
| | (SEQ ID NO: 657) | |
| (SEQ ID NO: 21) | TTTCTCTAACCAAACACCTAAAA | 398 |
| | (SEQ ID NO: 658) | |
| | AGAAATTAGTAGAGGAGGGAGG | |
| | (SEQ ID NO: 659) | |
| (SEQ ID NO: 43) | ATCTAATCCCTCTCCTAACTCC | 441 |
| | (SEQ ID NO: 660) | |
| | TTTGTTTTGGAATTTAGGTTTT | |
| | (SEQ ID NO: 661) | |
| (SEQ ID NO: 9) | TCCACAAAACTCTCCTACTAAAA | 186 |
| | (SEQ ID NO: 662) | |
| | GGAAGGTTGGGTAGATATAGG | |
| | (SEQ ID NO: 663) | |
| (SEQ ID NO: 12) | TTGGTAGAGTTGAAAGGAGATAG | 402 |
| | (SEQ ID NO: 664) | |
| | AAAAACATTCCCTAAAAATTCC | |
| | (SEQ ID NO: 665) | |
| (SEQ ID NO: 47) | ATAGAATGGTTAGGGGGTATTT | 484 |
| | (SEQ ID NO: 666) | |
| | TACAAATATCAACCTCTCTCCC | |
| | (SEQ ID NO: 667) | |
| (SEQ ID NO: 20) | GGTGGGGTATAATAGTAGGGAT | 448 |
| | (SEQ ID NO: 668) | |
| | CTTCCCCTCTTTCATTTTATTT | |
| | (SEQ ID NO: 669) | |
| (SEQ ID NO: 50) | GAGGAATTGGTATTGAAAGAAA | 426 |
| | (SEQ ID NO: 670) | |
| | CTAATCCACCCTCCATAAAAC | |
| | (SEQ ID NO: 671) | |
| (SEQ ID NO: 50) | CTCCAATTCTCCTCCCTATATC | 425 |
| | (SEQ ID NO: 672) | |
| | TAATTTTTGAGGTTGGGAAA | |
| | (SEQ ID NO: 673) | |

TABLE 2

| No: | Gene | Oligo: |
|---|---|---|
| 1 | (SEQ ID NO: 41) | TGGACGTAGGAAAGCGA |
| | | (SEQ ID NO: 681) |
| 2 | (SEQ ID NO: 41) | GATGTAGGAAAGTGAGA |
| | | (SEQ ID NO: 682) |
| 3 | (SEQ ID NO: 41) | ATTTACGGGAGTTTTATCGT |
| | | (SEQ ID NO: 683) |
| 4 | (SEQ ID NO: 41) | ATTTATGGGAGTTTTATTGT |
| | | (SEQ ID NO: 684) |
| 5 | (SEQ ID NO: 41) | ATTAGTTCGGGTCGCGT |
| | | (SEQ ID NO: 685) |
| 6 | (SEQ ID NO: 41) | ATTAGTTTGGGTTGTGT |
| | | (SEQ ID NO: 686) |
| 7 | (SEQ ID NO: 41) | TATACGAAAGGGAGGCGG |
| | | (SEQ ID NO: 687) |
| 8 | (SEQ ID NO: 41) | TATATGAAAGGGAGGTGG |
| | | (SEQ ID NO: 688) |
| 9 | (SEQ ID NO: 41) | GGCGTGTCGTTAGTTTTA |
| | | (SEQ ID NO: 689) |
| 10 | (SEQ ID NO: 41) | GGTGTGTTGTTAGTTTTATA |
| | | (SEQ ID NO: 690) |
| 11 | (SEQ ID NO: 41) | TTCGATTGACGTTAGCGA |
| | | (SEQ ID NO: 691) |
| 12 | (SEQ ID NO: 41) | TTTGATTGATGTTAGTGA |
| | | (SEQ ID NO: 692) |
| 13 | (SEQ ID NO: 41) | TTTCGAGTTTGACGGT |
| | | (SEQ ID NO: 693) |
| 14 | (SEQ ID NO: 41) | TTTTGAGTTTGATGGTT |
| | | (SEQ ID NO: 694) |
| 15 | (SEQ ID NO: 41) | TTCGGAGGGCGTATTT |
| | | (SEQ ID NO: 695) |
| 16 | (SEQ ID NO: 41) | TTTGGAGGGTGTATTT |
| | | (SEQ ID NO: 696) |
| 17 | (SEQ ID NO: 5) | GACGTCGGTACGTAGT |
| | | (SEQ ID NO: 697) |
| 18 | (SEQ ID NO: 5) | GATGTTGGTATGTAGTAG |
| | | (SEQ ID NO: 698) |
| 19 | (SEQ ID NO: 5) | TTCGGGGGAATTCGAGT |
| | | (SEQ ID NO: 699) |
| 20 | (SEQ ID NO: 5) | TTTGGGGGAATTTGAGT |
| | | (SEQ ID NO: 700) |
| 21 | (SEQ ID NO: 5) | TATTGCGAGGATTCGG |
| | | (SEQ ID NO: 701) |
| 22 | (SEQ ID NO: 5) | ATTGTGAGGATTTGGT |
| | | (SEQ ID NO: 702) |
| 23 | (SEQ ID NO: 5) | GTGCGTTCGTAGCGTA |
| | | (SEQ ID NO: 703) |
| 24 | (SEQ ID NO: 5) | TGTGTTTGTAGTGTAGG |
| | | (SEQ ID NO: 704) |
| 25 | (SEQ ID NO: 5) | GGACGTCGTTTGTTAG |
| | | (SEQ ID NO: 705) |
| 26 | (SEQ ID NO: 5) | GGATGTTGTTTGTTAGG |
| | | (SEQ ID NO: 706) |
| 27 | (SEQ ID NO: 5) | AGAGCGTCGTTTTGTA |
| | | (SEQ ID NO: 707) |
| 28 | (SEQ ID NO: 5) | AGAGTGTTGTTTTGTAT |
| | | (SEQ ID NO: 708) |
| 29 | (SEQ ID NO: 5) | TTTCGAGGGTAGGCGAG |
| | | (SEQ ID NO: 709) |
| 30 | (SEQ ID NO: 5) | TTTTGAGGGTAGGTGAG |
| | | (SEQ ID NO: 710) |
| 31 | (SEQ ID NO: 5) | TTTCGATTTTAATGCGAA |
| | | (SEQ ID NO: 711) |
| 32 | (SEQ ID NO: 5) | TTTGATTTTAATGTGAAGT |
| | | (SEQ ID NO: 712) |
| 33 | (SEQ ID NO: 5) | AGGAATTTCGTCGCGA |
| | | (SEQ ID NO: 713) |
| 34 | (SEQ ID NO: 5) | AGGAATTTTGTTGTGAT |
| | | (SEQ ID NO: 714) |
| 35 | (SEQ ID NO: 5) | TTTGAGTCGTACGCGT |
| | | (SEQ ID NO: 715) |
| 36 | (SEQ ID NO: 5) | TTTTGAGTTGTATGTGT |
| | | (SEQ ID NO: 716) |
| 37 | (SEQ ID NO: 6) | TACGTAGTTGCGCGTT |
| | | (SEQ ID NO: 717) |
| 38 | (SEQ ID NO: 51) | GTATGTAGTTGTGTGTT |
| | | (SEQ ID NO: 674) |
| 39 | (SEQ ID NO: 6) | AATCGGCGGTTAGGAT |
| | | (SEQ ID NO: 718) |
| 40 | (SEQ ID NO: 6) | GAATTGGTGGTTAGGA |
| | | (SEQ ID NO: 719) |
| 41 | (SEQ ID NO: 6) | TTTGATCGGGTTTGAG |
| | | (SEQ ID NO: 720) |
| 42 | (SEQ ID NO: 6) | TTTTGATTGGGTTTGAG |
| | | (SEQ ID NO: 721) |
| 43 | (SEQ ID NO: 51) | TTTGAGTATTCGTAGGAA |
| | | (SEQ ID NO: 675) |
| 44 | (SEQ ID NO: 6) | TGAGTATTTGTAGGAAGA |
| | | (SEQ ID NO: 722) |
| 45 | (SEQ ID NO: 6) | AGAGGCGCGGGTTATA |
| | | (SEQ ID NO: 723) |
| 46 | (SEQ ID NO: 6) | TAGAGGTGTGGGTTAT |
| | | (SEQ ID NO: 724) |
| 47 | (SEQ ID NO: 6) | TTAGCGGTTAAGTTGCGA |
| | | (SEQ ID NO: 725) |
| 48 | (SEQ ID NO: 6) | TTAGTGGTTAAGTTGTGA |
| | | (SEQ ID NO: 726) |
| 49 | (SEQ ID NO: 8) | TTCGTAGAAGAATACGCGTA |
| | | (SEQ ID NO: 727) |
| 50 | (SEQ ID NO: 8) | TTTGTAGAAGAATATGTGTA |
| | | (SEQ ID NO: 728) |
| 51 | (SEQ ID NO: 8) | AAACGTTTATCGGTTG |
| | | (SEQ ID NO: 729) |
| 52 | (SEQ ID NO: 8) | AATGTTTATTGGTTGGA |
| | | (SEQ ID NO: 730) |
| 53 | (SEQ ID NO: 8) | TATCGTAGTTCGTTCGG |
| | | (SEQ ID NO: 731) |
| 54 | (SEQ ID NO: 8) | ATTGTAGTTTGTTTGGT |
| | | (SEQ ID NO: 732) |
| 55 | (SEQ ID NO: 16) | TGGTCGGTATATTTCGA |
| | | (SEQ ID NO: 733) |
| 56 | (SEQ ID NO: 16) | TTGGTTGGTATATTTTGA |
| | | (SEQ ID NO: 734) |
| 57 | (SEQ ID NO: 16) | GGAGGTTTCGGTTCGA |
| | | (SEQ ID NO: 735) |
| 58 | (SEQ ID NO: 16) | TGGAGGTTTTGGTTTGA |
| | | (SEQ ID NO: 736) |
| 59 | (SEQ ID NO: 16) | TTAGCGGTAATAGCGG |
| | | (SEQ ID NO: 737) |
| 60 | (SEQ ID NO: 52) | TATTAGTGGTAATAGTGG |
| | | (SEQ ID NO: 676) |
| 61 | (SEQ ID NO: 42) | TGCGTAGTAGGCGGTT |
| | | (SEQ ID NO: 738) |
| 62 | (SEQ ID NO: 53) | TGTGTAGTAGGTGGTTT |
| | | (SEQ ID NO: 677) |
| 63 | (SEQ ID NO: 42) | TAGGCGGTTGTTCGTA |
| | | (SEQ ID NO: 739) |
| 64 | (SEQ ID NO: 42) | AGGTGGTTGTTTGTAA |
| | | (SEQ ID NO: 740) |
| 65 | (SEQ ID NO: 14) | TTGAAGTCGGTACGGT |
| | | (SEQ ID NO: 1125) |
| 66 | (SEQ ID NO: 14) | TGAAGTTGGTATGGTT |
| | | (SEQ ID NO: 1126) |
| 67 | (SEQ ID NO: 14) | TGGGACGCGGATATTT |
| | | (SEQ ID NO: 1127) |
| 68 | (SEQ ID NO: 14) | GTTGGGATGTGGATAT |
| | | (SEQ ID NO: 1128) |
| 69 | (SEQ ID NO: 43) | GTTCGGGTCGATTCGA |
| | | (SEQ ID NO: 741) |
| 70 | (SEQ ID NO: 43) | GGTTTGGTTGATTTGA |
| | | (SEQ ID NO: 742) |
| 71 | (SEQ ID NO: 43) | TTCGGGATATATTCGATT |
| | | (SEQ ID NO: 743) |
| 72 | (SEQ ID NO: 43) | TTTTGGGATATATTTGATT |
| | | (SEQ ID NO: 744) |
| 73 | (SEQ ID NO: 43) | TATTCGAATTGTATTCGT |
| | | (SEQ ID NO: 745) |
| 74 | (SEQ ID NO: 43) | TTTGAATTGTATTTGTTTAT |
| | | (SEQ ID NO: 746) |
| 75 | (SEQ ID NO: 15) | TTAAGTTCGATTCGGT |
| | | (SEQ ID NO: 747) |
| 76 | (SEQ ID NO: 54) | AGTTTGATTTGGTGAAT |
| | | (SEQ ID NO: 678) |
| 77 | (SEQ ID NO: 15) | TAGTTGTTCGAGAGGG |
| | | (SEQ ID NO: 748) |
| 78 | (SEQ ID NO: 15) | AGTTGTTTGAGAGGGT |
| | | (SEQ ID NO: 749) |
| 79 | (SEQ ID NO: 15) | ATAGTATCGAGGTGAGT |
| | | (SEQ ID NO: 750) |
| 80 | (SEQ ID NO: 15) | ATAGTATTGAGGTGAGTT |
| | | (SEQ ID NO: 751) |
| 81 | (SEQ ID NO: 15) | TTCGGGATTCGATAAT |
| | | (SEQ ID NO: 752) |
| 82 | (SEQ ID NO: 15) | AGGTTTTGGGATTTGA |
| | | (SEQ ID NO: 753) |
| 83 | (SEQ ID NO: 15) | TTAGGACGCGGCGATA |
| | | (SEQ ID NO: 754) |
| 84 | (SEQ ID NO: 15) | AGGATGTGGTGATAGT |
| | | (SEQ ID NO: 755) |
| 85 | (SEQ ID NO: 15) | TTGTACGTTCGGTATT |
| | | (SEQ ID NO: 756) |
| 86 | (SEQ ID NO: 15) | TAAGTTGTATGTTTGGTA |
| | | (SEQ ID NO: 757) |
| 87 | (SEQ ID NO: 4) | GGCGTCGAGGTCGTAG |
| | | (SEQ ID NO: 758) |
| 88 | (SEQ ID NO: 4) | GGTGTTGAGGTTGTAGT |
| | | (SEQ ID NO: 759) |
| 89 | (SEQ ID NO: 4) | AGGGTTTCGATTTTCGG |
| | | (SEQ ID NO: 760) |
| 90 | (SEQ ID NO: 4) | AGGGTTTTGATTTTTGG |
| | | (SEQ ID NO: 761) |
| 91 | (SEQ ID NO: 4) | TGGAACGTGCGATTGT |
| | | (SEQ ID NO: 762) |
| 92 | (SEQ ID NO: 4) | TGGAATGTGTGATTGT |
| | | (SEQ ID NO: 763) |
| 93 | (SEQ ID NO: 4) | TTTTGGCGCGTTTATA |
| | | (SEQ ID NO: 764) |
| 94 | (SEQ ID NO: 4) | TTGGTGTGTTTATAGATA |
| | | (SEQ ID NO: 765) |
| 95 | (SEQ ID NO: 4) | AGATTTTTACGATTCGA |
| | | (SEQ ID NO: 766) |
| 96 | (SEQ ID NO: 4) | TTTTTATGATTTGAAATAGA |
| | | (SEQ ID NO: 767) |
| 97 | (SEQ ID NO: 4) | AGTATTTTCGCGTGTT |
| | | (SEQ ID NO: 768) |
| 98 | (SEQ ID NO: 4) | TAGTATTTTTGTGTGTTAA |
| | | (SEQ ID NO: 769) |
| 99 | (SEQ ID NO: 7) | TTCGTCGGCGGTAGAG |
| | | (SEQ ID NO: 770) |
| 100 | (SEQ ID NO: 7) | TAGAGTTTGTTGGTGG |
| | | (SEQ ID NO: 771) |
| 101 | (SEQ ID NO: 7) | GATCGCGGGTACGTTT |
| | | (SEQ ID NO: 772) |
| 102 | (SEQ ID NO: 7) | ATTGTGGGTATGTTTGT |
| | | (SEQ ID NO: 773) |
| 103 | (SEQ ID NO: 7) | TTAACGTCGTTGGTTA |
| | | (SEQ ID NO: 774) |
| 104 | (SEQ ID NO: 7) | TGATTAATGTTGTTGGT |
| | | (SEQ ID NO: 775) |
| 105 | (SEQ ID NO: 7) | TTCGCGCGAAGATTTA |
| | | (SEQ ID NO: 776) |
| 106 | (SEQ ID NO: 7) | GTTTTTGTGTGAAGATT |
| | | (SEQ ID NO: 777) |
| 107 | (SEQ ID NO: 44) | TTCGATATCGTGACGG |
| | | (SEQ ID NO: 778) |
| 108 | (SEQ ID NO: 44) | TTTTGATATTGTGATGGT |
| | | (SEQ ID NO: 779) |
| 109 | (SEQ ID NO: 44) | AGAATACGGTCGTAGA |
| | | (SEQ ID NO: 780) |
| 110 | (SEQ ID NO: 44) | TAGAATATGGTTGTAGATA |
| | | (SEQ ID NO: 781) |
| 111 | (SEQ ID NO: 44) | TATTTTTGCGTACGGG |
| | | (SEQ ID NO: 782) |
| 112 | (SEQ ID NO: 44) | ATTTTTGTGTATGGGTT |
| | | (SEQ ID NO: 783) |
| 113 | (SEQ ID NO: 1) | TTACGGTGAAGGCGGA |
| | | (SEQ ID NO: 784) |
| 114 | (SEQ ID NO: 1) | TTATGGTGAAGGTGGA |
| | | (SEQ ID NO: 785) |
| 115 | (SEQ ID NO: 1) | TTCGGGATTAATATCGAGAT |
| | | (SEQ ID NO: 786) |
| 116 | (SEQ ID NO: 1) | TTTGGGATTAATATTGAGAT |
| | | (SEQ ID NO: 787) |
| 117 | (SEQ ID NO: 1) | TTTCGGTTTTCGTTAAT |
| | | (SEQ ID NO: 788) |
| 118 | (SEQ ID NO: 1) | TTTGGTTTTTGTTAATTTAG |
| | | (SEQ ID NO: 789) |
| 119 | (SEQ ID NO: 1) | TGTGCGAAGTTAACGT |
| | | (SEQ ID NO: 790) |
| 120 | (SEQ ID NO: 1) | TTGTGTGAAGTTAATGT |
| | | (SEQ ID NO: 791) |
| 121 | (SEQ ID NO: 1) | AAGTTTATCGGCGTTT |
| | | (SEQ ID NO: 792) |
| 122 | (SEQ ID NO: 1) | AGAAGTTTATTGGTGTTT |
| | | (SEQ ID NO: 793) |
| 123 | (SEQ ID NO: 1) | ATTTCGGAATTTAAGCGT |
| | | (SEQ ID NO: 794) |
| 124 | (SEQ ID NO: 1) | TTTGGAATTTAAGTGTTT |
| | | (SEQ ID NO: 795) |
| 125 | (SEQ ID NO: 1) | TTTTCGCGATTGGAGA |
| | | (SEQ ID NO: 796) |
| 126 | (SEQ ID NO: 1) | GTTTTTGTGATTGGAGA |
| | | (SEQ ID NO: 797) |
| 127 | (SEQ ID NO: 1) | ATTTACGCGTTTTAGG |
| | | (SEQ ID NO: 798) |
| 128 | (SEQ ID NO: 1) | ATGGAATTTATGTGTTTT |
| | | (SEQ ID NO: 799) |
| 129 | (SEQ ID NO: 1) | ATGTCGCGGTTTTATA |
| | | (SEQ ID NO: 800) |
| 130 | (SEQ ID NO: 1) | GGATGTTGTGGTTTTAT |
| | | (SEQ ID NO: 801) |
| 131 | (SEQ ID NO: 2) | AGACGGGGTTTACGAG |
| | | (SEQ ID NO: 802) |
| 132 | (SEQ ID NO: 2) | AGATGGGGTTTATGAG |
| | | (SEQ ID NO: 803) |
| 133 | (SEQ ID NO: 2) | TGTCGGTATTAGCGTT |
| | | (SEQ ID NO: 804) |
| 134 | (SEQ ID NO: 2) | GTGTTGGTATTAGTGTT |
| | | (SEQ ID NO: 805) |
| 135 | (SEQ ID NO: 2) | TGGTTTACGTTCGGTA |
| | | (SEQ ID NO: 806) |
| 136 | (SEQ ID NO: 2) | GGTTTATGTTTGGTAGT |
| | | (SEQ ID NO: 807) |
| 137 | (SEQ ID NO: 2) | TTCGTACGGTTAGGTT |
| | | (SEQ ID NO: 808) |
| 138 | (SEQ ID NO: 2) | AGTTTTGTATGGTTAGG |
| | | (SEQ ID NO: 809) |
| 139 | (SEQ ID NO: 45) | ATAGCGATTTCGGCGA |
| | | (SEQ ID NO: 810) |
| 140 | (SEQ ID NO: 45) | AGTGATTTTGGTGAGA |
| | | (SEQ ID NO: 811) |
| 141 | (SEQ ID NO: 45) | GGCGTTTTATTTACGAGA |
| | | (SEQ ID NO: 812) |
| 142 | (SEQ ID NO: 45) | GGGTGTTTTATTTATGAG |
| | | (SEQ ID NO: 813) |
| 143 | (SEQ ID NO: 45) | ATCGTGGACGGTAACGA |
| | | (SEQ ID NO: 814) |
| 144 | (SEQ ID NO: 45) | ATTGTGGATGGTAATGA |
| | | (SEQ ID NO: 815) |
| 145 | (SEQ ID NO: 45) | TTGAGATCGATTCGTT |
| | | (SEQ ID NO: 816) |
| 146 | (SEQ ID NO: 45) | TGAGATTGATTTGTTTAG |
| | | (SEQ ID NO: 817) |
| 147 | (SEQ ID NO: 45) | GGCGAGATTCGTACGT |
| | | (SEQ ID NO: 818) |
| 148 | (SEQ ID NO: 45) | GGTGAGATTTGTATGTT |
| | | (SEQ ID NO: 819) |
| 149 | (SEQ ID NO: 45) | TGACGTTCGTGGTGGA |
| | | (SEQ ID NO: 820) |
| 150 | (SEQ ID NO: 45) | GATGTTTGTGGTGGAG |
| | | (SEQ ID NO: 821) |
| 151 | (SEQ ID NO: 45) | GTGATCGATTACGGTA |
| | | (SEQ ID NO: 822) |
| 152 | (SEQ ID NO: 45) | AGGTGATTGATTATGGT |
| | | (SEQ ID NO: 823) |
| 153 | (SEQ ID NO: 45) | ATTATTCGTTCGGTGA |
| | | (SEQ ID NO: 824) |
| 154 | (SEQ ID NO: 45) | TATTATTTGTTTGGTGAG |
| | | (SEQ ID NO: 825) |
| 155 | (SEQ ID NO: 45) | TATCGTCGTTAAGTGT |
| | | (SEQ ID NO: 826) |
| 156 | (SEQ ID NO: 45) | TATTATTGTTGTTAAGTGT |
| | | (SEQ ID NO: 827) |
| 157 | (SEQ ID NO: 45) | TGTAAGCGCGAGAATA |
| | | (SEQ ID NO: 828) |
| 158 | (SEQ ID NO: 45) | AGTGTAAGTGTGAGAAT |
| | | (SEQ ID NO: 829) |
| 159 | (SEQ ID NO: 9) | TATAGCGGTTTACGGT |
| | | (SEQ ID NO: 830) |
| 160 | (SEQ ID NO: 9) | TAGTGGTTTATGGTAGT |
| | | (SEQ ID NO: 831) |
| 161 | (SEQ ID NO: 9) | AGGGCGATTAGGACGT |
| | | (SEQ ID NO: 832) |
| 162 | (SEQ ID NO: 9) | AGGGTGATTAGGATGT |
| | | (SEQ ID NO: 833) |
| 163 | (SEQ ID NO: 46) | TTCGTTAGAGTTCGTAG |
| | | (SEQ ID NO: 834) |
| 164 | (SEQ ID NO: 46) | TTTGTTAGAGTTTGTAGT |
| | | (SEQ ID NO: 835) |
| 165 | (SEQ ID NO: 46) | TGAGACGTTTGTCGGT |
| | | (SEQ ID NO: 836) |
| 166 | (SEQ ID NO: 46) | TGAGATGTTTGTTGGT |
| | | (SEQ ID NO: 837) |
| 167 | (SEQ ID NO: 46) | GAAAAGTTCGTCGGTT |
| | | (SEQ ID NO: 838) |
| 168 | (SEQ ID NO: 46) | AGAAAAGTTTGTTGGTT |
| | | (SEQ ID NO: 839) |
| 169 | (SEQ ID NO: 46) | ATGGCGTAGTCGCGAT |
| | | (SEQ ID NO: 840) |
| 170 | (SEQ ID NO: 46) | TGGTGTAGTTGTGATT |
| | | (SEQ ID NO: 841) |
| 171 | (SEQ ID NO: 10) | TTTTGACGTCGATGTA |
| | | (SEQ ID NO: 842) |
| 172 | (SEQ ID NO: 10) | TGATGTTGATGTAGAATT |
| | | (SEQ ID NO: 843) |
| 173 | (SEQ ID NO: 10) | TTGCGATGTGCGTTTA |
| | | (SEQ ID NO: 844) |
| 174 | (SEQ ID NO: 10) | TGTGATGTGTGTTTAGT |
| | | (SEQ ID NO: 845) |
| 175 | (SEQ ID NO: 10) | TGATTACGGCGCGGAT |
| | | (SEQ ID NO: 846) |
| 176 | (SEQ ID NO: 10) | ATTATGGTGTGGATGG |
| | | (SEQ ID NO: 847) |
| 177 | (SEQ ID NO: 10) | AGATGGCGACGTCGAA |
| | | (SEQ ID NO: 848) |
| 178 | (SEQ ID NO: 10) | ATGGTGATGTTGAAGA |
| | | (SEQ ID NO: 849) |
| 179 | (SEQ ID NO: 10) | TTTAAGCGCGGCGGTA |
| | | (SEQ ID NO: 850) |
| 180 | (SEQ ID NO: 10) | TTTTAAGTGTGGTGGTA |
| | | (SEQ ID NO: 851) |
| 181 | (SEQ ID NO: 10) | AGAAACGTAGACGCGA |
| | | (SEQ ID NO: 852) |
| 182 | (SEQ ID NO: 10) | AATGTAGATGTGATGGA |
| | | (SEQ ID NO: 853) |
| 183 | (SEQ ID NO: 11) | AGAGACGCGAAAAATT |
| | | (SEQ ID NO: 854) |
| 184 | (SEQ ID NO: 11) | TAGAGAGATGTGAAAAAT |
| | | (SEQ ID NO: 855) |
| 185 | (SEQ ID NO: 11) | AGACGAAAGAGTCGTT |
| | | (SEQ ID NO: 856) |
| 186 | (SEQ ID NO: 11) | AGAGATGAAAGAGTTGT |
| | | (SEQ ID NO: 857) |
| 187 | (SEQ ID NO: 11) | TTTTAGTTCGAGCGTA |
| | | (SEQ ID NO: 858) |
| 188 | (SEQ ID NO: 11) | TTAGTTTGAGTGTAGTTA |
| | | (SEQ ID NO: 859) |
| 189 | (SEQ ID NO: 11) | GACGTGAATTTTCGGAA |
| | | (SEQ ID NO: 860) |
| 190 | (SEQ ID NO: 11) | AGGATGTGAATTTTTGG |
| | | (SEQ ID NO: 861) |
| 191 | (SEQ ID NO: 11) | AATGCGTGGTCGTTTT |
| | | (SEQ ID NO: 862) |
| 192 | (SEQ ID NO: 11) | GAAATGTGTGGTTGTT |
| | | (SEQ ID NO: 863) |
| 193 | (SEQ ID NO: 11) | TTTCGTTTGCGGAATT |
| | | (SEQ ID NO: 864) |
| 194 | (SEQ ID NO: 11) | TTTTGTTTGTGGAATTG |
| | | (SEQ ID NO: 865) |
| 195 | (SEQ ID NO: 12) | TGTTCGACGTGATTTT |
| | | (SEQ ID NO: 866) |
| 196 | (SEQ ID NO: 12) | GTGTTTGATGTGATTTT |
| | | (SEQ ID NO: 867) |
| 197 | (SEQ ID NO: 12) | TAACGTTTTTTCGGGT |
| | | (SEQ ID NO: 868) |
| 198 | (SEQ ID NO: 12) | TTAATGTTTTTTTGGGTG |
| | | (SEQ ID NO: 869) |
| 199 | (SEQ ID NO: 12) | TGTTGATTCGGAAATGA |
| | | (SEQ ID NO: 870) |
| 200 | (SEQ ID NO: 12) | TTTGTTGATTTGGAAATG |
| | | (SEQ ID NO: 871) |
| 201 | (SEQ ID NO: 13) | TAAAGTTTCGAAGCGG |
| | | (SEQ ID NO: 1129) |
| 202 | (SEQ ID NO: 13) | AGTTTTGAAGTGGAGT |
| | | (SEQ ID NO: 1130) |
| 203 | (SEQ ID NO: 13) | AAGTCGGTAGTTATCGT |
| | | (SEQ ID NO: 1131) |
| 204 | (SEQ ID NO: 13) | AAGTTGGTAGTTATTGTT |
| | | (SEQ ID NO: 1132) |
| 205 | (SEQ ID NO: 3) | TTGGAGCGCGAGAAAG |
| | | (SEQ ID NO: 872) |
| 206 | (SEQ ID NO: 3) | TTGGAGTGTGAGAAAG |
| | | (SEQ ID NO: 873) |
| 207 | (SEQ ID NO: 3) | TACGTTATCGGTTCGT |
| | | (SEQ ID NO: 874) |
| 208 | (SEQ ID NO: 3) | TATGTTATTGGTTTGTATT |
| | | (SEQ ID NO: 875) |
| 209 | (SEQ ID NO: 3) | ATTAGGTTCGTGGGCGT |
| | | (SEQ ID NO: 876) |
| 210 | (SEQ ID NO: 3) | ATTAGGTTTGTGGGTGT |
| | | (SEQ ID NO: 877) |
| 211 | (SEQ ID NO: 3) | TGCGGTTTAGAAACGTAG |
| | | (SEQ ID NO: 878) |
| 212 | (SEQ ID NO: 3) | TGTGGTTTAGAAATGTAG |
| | | (SEQ ID NO: 879) |
| 213 | (SEQ ID NO: 3) | GAACGGGTTTCGTAGT |
| | | (SEQ ID NO: 880) |
| 214 | (SEQ ID NO: 3) | GGGAATGGGTTTTGTA |
| | | (SEQ ID NO: 881) |
| 215 | (SEQ ID NO: 3) | TTGCGATAGTCGGCGG |
| | | (SEQ ID NO: 882) |
| 216 | (SEQ ID NO: 3) | TTGTGATAGTTGGTGG |
| | | (SEQ ID NO: 883) |
| 217 | (SEQ ID NO: 3) | AAGAACGGACGTGTTT |
| | | (SEQ ID NO: 884) |
| 218 | (SEQ ID NO: 3) | AGGAAGAATGGATGTG |
| | | (SEQ ID NO: 885) |
| 219 | (SEQ ID NO: 47) | AAGTTTCGTTTGGGAG |
| | | (SEQ ID NO: 886) |
| 220 | (SEQ ID NO: 47) | AAAGTTTTGTTTGGGAG |
| | | (SEQ ID NO: 887) |
| 221 | (SEQ ID NO: 47) | TTGGAAGTCGAAGAGA |
| | | (SEQ ID NO: 888) |
| 222 | (SEQ ID NO: 47) | TTTGGAAGTTGAAGAGA |
| | | (SEQ ID NO: 889) |
| 223 | (SEQ ID NO: 18) | TATCGGGTTCGATTTT |
| | | (SEQ ID NO: 890) |
| 224 | (SEQ ID NO: 18) | GGTGTATTGGGTTTGA |
| | | (SEQ ID NO: 891) |
| 225 | (SEQ ID NO: 20) | TAGGGATTCGCGGAGG |
| | | (SEQ ID NO: 892) |
| 226 | (SEQ ID NO: 20) | TAGGGATTTGTGGAGG |
| | | (SEQ ID NO: 893) |
| 227 | (SEQ ID NO: 20) | TTGTCGAGTAATTTTCGT |
| | | (SEQ ID NO: 894) |
| 228 | (SEQ ID NO: 20) | TGTTGAGTAATTTTTGTT |
| | | (SEQ ID NO: 895) |
| 229 | (SEQ ID NO: 20) | TATTACGGGCGGAGGG |
| | | (SEQ ID NO: 896) |
| 230 | (SEQ ID NO: 20) | TATTATGGGTGGAGGG |
| | | (SEQ ID NO: 897) |
| 231 | (SEQ ID NO: 20) | GACGGTACGTTAGAGG |
| | | (SEQ ID NO: 898) |
| 232 | (SEQ ID NO: 20) | GATGGTATGTTAGAGGT |
| | | (SEQ ID NO: 899) |
| 233 | (SEQ ID NO: 20) | TTGGGCGTCGTTATTA |
| | | (SEQ ID NO: 900) |
| 234 | (SEQ ID NO: 20) | TGGGTGTTGTTATTAGT |
| | | (SEQ ID NO: 901) |
| 235 | (SEQ ID NO: 20) | TATTAGTTCGGTCGTT |
| | | (SEQ ID NO: 902) |
| 236 | (SEQ ID NO: 20) | AGTTTGGTTGTTAGTTT |
| | | (SEQ ID NO: 903) |
| 237 | (SEQ ID NO: 20) | TTATTACGTTTAGCGAT |
| | | (SEQ ID NO: 904) |
| 238 | (SEQ ID NO: 20) | TTTTTATTATGTTTAGTGATA |
| | | (SEQ ID NO: 905) |
| 239 | (SEQ ID NO: 20) | ATAGCGAGTGCGATAT |
| | | (SEQ ID NO: 906) |
| 240 | (SEQ ID NO: 48) | AGGGTCGTAGCGGTAG |
| | | (SEQ ID NO: 907) |
| 241 | (SEQ ID NO: 48) | GAGGGTTGTAGTGGTA |
| | | (SEQ ID NO: 908) |
| 242 | (SEQ ID NO: 50) | TTAGGTCGGACGTAAG |
| | | (SEQ ID NO: 1143) |
| 243 | (SEQ ID NO: 50) | GGTTAGGTTGGATGTA |
| | | (SEQ ID NO: 1144) |
| 244 | (SEQ ID NO: 22) | TAGACGTGGGGTTACGT |
| | | (SEQ ID NO: 909) |
| 245 | (SEQ ID NO: 22) | TAGATGTGGGGTTATGT |
| | | (SEQ ID NO: 910) |
| 246 | (SEQ ID NO: 22) | ATTTCGGGGTAGTATCGT |
| | | (SEQ ID NO: 911) |
| 247 | (SEQ ID NO: 22) | ATTTTGGGGTAGTATTGT |
| | | (SEQ ID NO: 912) |
| 248 | (SEQ ID NO: 19) | TACGCGCGTTTTAAAA |
| | | (SEQ ID NO: 913) |
| 249 | (SEQ ID NO: 19) | TTATGTGTGTTTTAAAATG |
| | | (SEQ ID NO: 914) |
| 250 | (SEQ ID NO: 19) | TACGATATCGTTATATAACGG |
| | | (SEQ ID NO: 915) |
| 251 | (SEQ ID NO: 19) | TATGATATTGTTATATAATGG |
| | | (SEQ ID NO: 916) |
| 252 | (SEQ ID NO: 19) | TATAGGTTCGCGGTTT |
| | | (SEQ ID NO: 917) |
| 253 | (SEQ ID NO: 19) | TATATAGGTTTGTGGTTT |
| | | (SEQ ID NO: 918) |
| 254 | (SEQ ID NO: 19) | TAGGTGCGCGTTATAT |
| | | (SEQ ID NO: 919) |
| 255 | (SEQ ID NO: 19) | ATGTAGGTGTGTGTTAT |
| | | (SEQ ID NO: 920) |
| 256 | (SEQ ID NO: 55) | TACGTTGTTTGGACGAAT |
| | | (SEQ ID NO: 679) |
| 257 | (SEQ ID NO: 19) | TATGTTGTTTGGATGAAT |
| | | (SEQ ID NO: 921) |
| 258 | (SEQ ID NO: 19) | AAGGAGCGTATTTCGG |
| | | (SEQ ID NO: 922) |
| 259 | (SEQ ID NO: 19) | AGGAGTGTATTTTGGG |
| | | (SEQ ID NO: 923) |
| 260 | (SEQ ID NO: 55) | GTCGGATTTCGGAAGT |
| | | (SEQ ID NO: 680) |
| 261 | (SEQ ID NO: 19) | GTTGGATTTTGGAAGTG |
| | | (SEQ ID NO: 924) |
| 262 | (SEQ ID NO: 19) | GAAGTGACGCGTTCGT |
| | | (SEQ ID NO: 925) |
| 263 | (SEQ ID NO: 19) | GAAGTGATGTGTTTGT |
| | | (SEQ ID NO: 926) |
| 264 | (SEQ ID NO: 19) | TGTTATCGTTGCGCGA |
| | | (SEQ ID NO: 927) |
| 265 | (SEQ ID NO: 19) | ATGTTATTGTTGTGTGA |
| | | (SEQ ID NO: 928) |
| 266 | (SEQ ID NO: 17) | TGAAAACGTTTTTCGT |
| | | (SEQ ID NO: 929) |
| 267 | (SEQ ID NO: 17) | AATGTTTTTTGTAAAGAAA |
| | | (SEQ ID NO: 930) |
| 268 | (SEQ ID NO: 17) | AGGATTTCGGCGTTAT |
| | | (SEQ ID NO: 931) |
| 269 | (SEQ ID NO: 17) | AAAGGATTTTGGTGTTA |
| | | (SEQ ID NO: 932) |
| 270 | (SEQ ID NO: 17) | ATTTATTCGTGCGTTT |
| | | (SEQ ID NO: 933) |
| 271 | (SEQ ID NO: 17) | TATTTGTGTGTTTAGGG |
| | | (SEQ ID NO: 934) |
| 272 | (SEQ ID NO: 17) | TTTCGGTGGTTTTCGAA |
| | | (SEQ ID NO: 935) |
| 273 | (SEQ ID NO: 17) | TTTGGTGGTTTTTGAAG |
| | | (SEQ ID NO: 936) |
| 274 | (SEQ ID NO: 17) | GGCGTACGGAATTTTA |
| | | (SEQ ID NO: 937) |
| 275 | (SEQ ID NO: 17) | GGGTGTATGGAATTTTA |
| | | (SEQ ID NO: 938) |
| 276 | (SEQ ID NO: 17) | TGGACGGAGGTTTCGT |
| | | (SEQ ID NO: 939) |
| 277 | (SEQ ID NO: 17) | TGGATGGAGGTTTTGT |
| | | (SEQ ID NO: 940) |
| 278 | (SEQ ID NO: 17) | TGCGGACGGGATAGTT |
| | | (SEQ ID NO: 941) |
| 279 | (SEQ ID NO: 17) | TGTGGATGGGATAGTT |
| | | (SEQ ID NO: 942) |
| 280 | (SEQ ID NO: 17) | TGATTAGTCGATTCGT |
| | | (SEQ ID NO: 943) |
| 281 | (SEQ ID NO: 17) | GATGTAGGGATGGAGA |
| | | (SEQ ID NO: 944) |
| 282 | (SEQ ID NO: 17) | TATCGTGGTTTTTTACGTAT |
| | | (SEQ ID NO: 945) |
| 283 | (SEQ ID NO: 17) | ATATTGTGGTTTTTTATGTA |
| | | (SEQ ID NO: 946) |
| 284 | (SEQ ID NO: 17) | TTTATTCGGTGTTCGA |
| | | (SEQ ID NO: 947) |
| 285 | (SEQ ID NO: 17) | TATTTGGTGTTTGAGAG |
| | | (SEQ ID NO: 948) |
| 286 | (SEQ ID NO: 23) | GAGGCGCGTTATTTTT |
| | | (SEQ ID NO: 1133) |
| 287 | (SEQ ID NO: 23) | GGGAGGTGTGTTATTTT |
| | | (SEQ ID NO: 1134) |
| 288 | (SEQ ID NO: 23) | AACGGTAGTTAGCGATA |
| | | (SEQ ID NO: 1135) |
| 289 | (SEQ ID NO: 23) | TGAATGGTAGTTAGTGA |
| | | (SEQ ID NO: 1136) |
| 290 | (SEQ ID NO: 23) | TTTTAACGTTCGCGGA |
| | | (SEQ ID NO: 1137) |
| 291 | (SEQ ID NO: 23) | AATGTTTGTGGAGGAT |
| | | (SEQ ID NO: 1138) |
| 292 | (SEQ ID NO: 21) | TTTTTCGCGTATATGTT |
| | | (SEQ ID NO: 1139) |
| 293 | (SEQ ID NO: 21) | TTTTTTGTGTATATGTTTAGG |
| | | (SEQ ID NO: 1140) |
| 294 | (SEQ ID NO: 21) | AAGGGCGGTAAGACGG |
| | | (SEQ ID NO: 1141) |
| 295 | (SEQ ID NO: 21) | AAGGGTGGTAAGATGG |
| | | (SEQ ID NO: 1142) |
| 296 | (SEQ ID NO: 32) | GGTTTCGTTTAATCGT |
| | | (SEQ ID NO: 949) |
| 297 | (SEQ ID NO: 32) | GGGTTTTGTTTAATTGTA |
| | | (SEQ ID NO: 950) |
| 298 | (SEQ ID NO: 32) | GATTCGTATTTCGTAGT |
| | | (SEQ ID NO: 951) |
| 299 | (SEQ ID NO: 32) | TTTGTATTTTGTAGTGGG |
| | | (SEQ ID NO: 952) |
| 300 | (SEQ ID NO: 32) | TTCGTATTTAGCGGAT |
| | | (SEQ ID NO: 953) |
| 301 | (SEQ ID NO: 32) | GGTTTGTATTTAGTGGA |
| | | (SEQ ID NO: 954) |
| 302 | (SEQ ID NO: 32) | TTAATCGGCGGGTTTT |
| | | (SEQ ID NO: 955) |
| 303 | (SEQ ID NO: 32) | AGTTAATTGGTGGGTT |
| | | (SEQ ID NO: 956) |
| 304 | (SEQ ID NO: 32) | TATTTTGGCGGGTTGTAT |
| | | (SEQ ID NO: 957) |
| 305 | (SEQ ID NO: 32) | TATTTTGGTGGGTTGTAT |
| | | (SEQ LD NO: 958) |
| 306 | (SEQ ID NO: 32) | AAGGTTATCGGTTTAAGA |
| | | (SEQ ID NO: 959) |
| 307 | (SEQ ID NO: 32) | AAGGTTATTGGTTTAAGA |
| | | (SEQ ID NO: 960) |
| 308 | (SEQ ID NO: 32) | GGGGGACGACGTTTTTGT |
| | | (SEQ ID NO: 961) |
| 309 | (SEQ ID NO: 32) | GGGGGATGATGTTTTTGT |
| | | (SEQ ID NO: 962) |
| 310 | (SEQ ID NO: 33) | TTACGGTTCGGTTATT |
| | | (SEQ ID NO: 963) |
| 311 | (SEQ ID NO: 33) | AGGTTTTATGGTTTGGT |
| | | (SEQ ID NO: 964) |
| 312 | (SEQ ID NO: 33) | GACGTCGCGGGGTTAG |
| | | (SEQ ID NO: 965) |
| 313 | (SEQ ID NO: 33) | TGATGTTGTGGGGTTA |
| | | (SEQ ID NO: 966) |
| 314 | (SEQ ID NO: 33) | AGGTATTTCGCGATAT |
| | | (SEQ ID NO: 967) |
| 315 | (SEQ ID NO: 33) | AGGTATTTTGTGATATTTT |
| | | (SEQ ID NO: 968) |
| 316 | (SEQ ID NO: 33) | GTTTTTCGATTTACGTT |
| | | (SEQ ID NO: 969) |
| 317 | (SEQ ID NO: 33) | TAGGTTTTTTGATTTATGT |
| | | (SEQ ID NO: 970) |
| 318 | (SEQ ID NO: 33) | GGTAGTTTCGATTATTTA |
| | | (SEQ ID NO: 971) |
| 319 | (SEQ ID NO: 33) | GGTAGTTTTGATTATTTA |
| | | (SEQ ID NO: 972) |
| 320 | (SEQ ID NO: 33) | TAGAGTACGGGGCGGG |
| | | (SEQ ID NO: 973) |
| 321 | (SEQ ID NO: 33) | TAGAGTATGGGGTGGG |
| | | (SEQ ID NO: 974) |
| 322 | (SEQ ID NO: 33) | TTGTTTAGCGGATTTTAG |
| | | (SEQ ID NO: 975) |
| 323 | (SEQ ID NO: 33) | TTGTTTAGTGGATTTTAG |
| | | (SEQ ID NO: 976) |
| 324 | (SEQ ID NO: 33) | TAGGTTCGGTTCGTTAT |
| | | (SEQ ID NO: 977) |
| 325 | (SEQ ID NO: 33) | TAGGTTTGGTTTGTTATT |
| | | (SEQ ID NO: 978) |
| 326 | (SEQ ID NO: 33) | TGGTGGTACGTAGTTTGG |
| | | (SEQ ID NO: 979) |
| 327 | (SEQ ID NO: 33) | TTTGGCGTAGATCGGT |
| | | (SEQ ID NO: 980) |
| 328 | (SEQ ID NO: 33) | TTTGGTGTAGATTGGT |
| | | (SEQ ID NO: 981) |
| 329 | (SEQ ID NO: 33) | AGTGTTCGTCGTAGTT |
| | | (SEQ ID NO: 982) |
| 330 | (SEQ ID NO: 33) | TGAGTGTTTGTTGTAGT |
| | | (SEQ ID NO: 983) |
| 331 | (SEQ ID NO: 33) | GTGTTTAGCGCGGATT |
| | | (SEQ ID NO: 984) |
| 332 | (SEQ ID NO: 33) | GGTGTTTAGTGTGGATT |
| | | (SEQ ID NO: 985) |
| 333 | (SEQ ID NO: 34) | TTCGGTTAGTTTCGTAT |
| | | (SEQ ID NO: 986) |
| 334 | (SEQ ID NO: 34) | TTTTGGTTAGTTTTGTATT |
| | | (SEQ ID NO: 987) |
| 335 | (SEQ ID NO: 34) | GATTCGTTTGGGTAACGT |
| | | (SEQ ID NO: 988) |
| 336 | (SEQ ID NO: 34) | GATTTGTTTGGGTAATGT |
| | | (SEQ ID NO: 989) |
| 337 | (SEQ ID NO: 34) | GTCGAATTTAGTCGCGT |
| | | (SEQ ID NO: 990) |
| 338 | (SEQ ID NO: 34) | GTTGAATTTAGTTGTGTA |
| | | (SEQ ID NO: 991) |
| 339 | (SEQ ID NO: 34) | AATTCGCGAGTTTAGA |
| | | (SEQ ID NO: 992) |
| 340 | (SEQ ID NO: 34) | AAAAATTTGTGAGTTTAG |
| | | (SEQ ID NO: 993) |
| 341 | (SEQ ID NO: 24) | AGGGGTTCGATTAGGG |
| | | (SEQ ID NO: 1145) |
| 342 | (SEQ ID NO: 24) | AGGGGTTTGATTAGGG |
| | | (SEQ ID NO: 1146) |
| 343 | (SEQ ID NO: 24) | TTAGGTATACGAAAGAGTAT |
| | | (SEQ ID NO: 1147) |
| 344 | (SEQ ID NO: 24) | TTAGGTATATGAAAGAGTAT |
| | | (SEQ ID NO: 1148) |
| 345 | (SEQ ID NO: 24) | TGTCGTACGTTATGTT |
| | | (SEQ ID NO: 1149) |
| 346 | (SEQ ID NO: 24) | GGTGTTGTATGTTATGT |
| | | (SEQ ID NO: 1150) |
| 347 | (SEQ ID NO: 24) | TTGATTGGCGGACGAG |
| | | (SEQ ID NO: 1151) |
| 348 | (SEQ ID NO: 24) | TTGATTGGTGGATGAG |
| | | (SEQ ID NO: 1152) |
| 349 | (SEQ ID NO: 35) | TATATATACGTGTGGGTA |
| | | (SEQ ID NO: 994) |
| 350 | (SEQ ID NO: 35) | TATATATATGTGTGGGTA |
| | | (SEQ ID NO: 995) |
| 351 | (SEQ ID NO: 35) | TATGTAGTCGCGTAGT |
| | | (SEQ ID NO: 996) |
| 352 | (SEQ ID NO: 35) | TTTATGTAGTTGTGTAGT |
| | | (SEQ ID NO: 997) |
| 353 | (SEQ ID NO: 35) | AGTGTATGCGTAGAAGGT |
| | | (SEQ ID NO: 998) |
| 354 | (SEQ ID NO: 35) | AGTGTATGTGTAGAAGGT |
| | | (SEQ ID NO: 999) |
| 355 | (SEQ ID NO: 35) | TTTAGATACGAAATGTTA |
| | | (SEQ ID NO: 1000) |
| 356 | (SEQ ID NO: 35) | TTTAGATATGAAATGTTA |
| | | (SEQ ID NO: 1001) |
| 357 | (SEQ ID NO: 35) | AAGTAAGTCGTTGTTGTT |
| | | (SEQ ID NO: 1002) |
| 358 | (SEQ ID NO: 35) | AAGTAAGTTGTTGTTGTT |
| | | (SEQ ID NO: 1003) |
| 359 | (SEQ ID NO: 25) | TTTCGTCGGAGGAATT |
| | | (SEQ ID NO: 1004) |
| 360 | (SEQ ID NO: 25) | GTTTTGTTGGAGGAATT |
| | | (SEQ ID NO: 1005) |
| 361 | (SEQ ID NO: 25) | ATCGTTTTGTCGGACGG |
| | | (SEQ ID NO: 1006) |
| 362 | (SEQ ID NO: 25) | ATTGTTTTGTTGGATGG |
| | | (SEQ ID NO: 1007) |
| 363 | (SEQ ID NO: 25) | TGTCGCGATATATCGA |
| | | (SEQ ID NO: 1008) |
| 364 | (SEQ ID NO: 25) | TTTGTTGTGATATATTGAT |
| | | (SEQ ID NO: 1009) |
| 365 | (SEQ ID NO: 36) | AGCGTCGATTAATCGT |
| | | (SEQ ID NO: 1010) |
| 366 | (SEQ ID NO: 36) | TTAAGTGTTGATTAATTGT |
| | | (SEQ ID NO: 1011) |
| 367 | (SEQ ID NO: 36) | TTCGGTCGGGTTTAAA |
| | | (SEQ ID NO: 1012) |
| 368 | (SEQ ID NO: 36) | GTTTGGTTGGGTTTAAA |
| | | (SEQ ID NO: 1013) |
| 369 | (SEQ ID NO: 36) | TAATCGTTAGCGGCGG |
| | | (SEQ ID NO: 1014) |
| 370 | (SEQ ID NO: 36) | TTAATTGTTAGTGGTGG |
| | | (SEQ ID NO: 1015) |
| 371 | (SEQ ID NO: 36) | TTAACGGGTGGGTACGT |
| | | (SEQ ID NO: 1016) |
| 372 | (SEQ ID NO: 36) | TTAATGGGTGGGTATGT |
| | | (SEQ ID NO: 1017) |
| 373 | (SEQ ID NO: 36) | AGGTCGTTGGTATTCGT |
| | | (SEQ ID NO: 1018) |
| 374 | (SEQ ID NO: 36) | AGGTTGTTGGTATTTGT |
| | | (SEQ ID NO: 1019) |
| 375 | (SEQ ID NO: 36) | TTTTCGAGTTTTATCGA |
| | | (SEQ ID NO: 1020) |
| 376 | (SEQ ID NO: 36) | TTTGAGTTTTATTGAGGT |
| | | (SEQ ID NO: 1021) |
| 377 | (SEQ ID NO: 36) | ATAGTCGTGGTTTCGT |
| | | (SEQ ID NO: 1022) |
| 378 | (SEQ ID NO: 36) | ATAGTTGTGGTTTTGTT |
| | | (SEQ ID NO: 1023) |
| 379 | (SEQ ID NO: 36) | TGACGGGCGTTTTCGA |
| | | (SEQ ID NO: 1024) |
| 380 | (SEQ ID NO: 36) | GATGGGTGTTTTTGAG |
| | | (SEQ ID NO: 1025) |
| 381 | (SEQ ID NO: 36) | TAATGAGCGCGTTGTA |
| | | (SEQ ID NO: 1026) |
| 382 | (SEQ ID NO: 36) | ATGAGTGTGTTGTATTT |
| | | (SEQ ID NO: 1027) |
| 383 | (SEQ ID NO: 28) | TTGGTTCGGGAAAGGTAA |
| | | (SEQ ID NO: 1028) |
| 384 | (SEQ ID NO: 28) | TTGGTTTGGGAAAGGTAA |
| | | (SEQ ID NO: 1029) |
| 385 | (SEQ ID NO: 28) | TTTCGGTGAATCGGAT |
| | | (SEQ ID NO: 1030) |
| 386 | (SEQ ID NO: 28) | TTTTTGGTGAATTGGAT |
| | | (SEQ ID NO: 1031) |
| 387 | (SEQ ID NO: 28) | TTCGTAAAGTCGTTGT |
| | | (SEQ ID NO: 1032) |
| 388 | (SEQ ID NO: 28) | GGTTTTTTGTAAAGTTGT |
| | | (SEQ ID NO: 1033) |
| 389 | (SEQ ID NO: 28) | GTTTAGTTAGCGGGTTTT |
| | | (SEQ ID NO: 1034) |
| 390 | (SEQ ID NO: 28) | GTTTAGTTAGTGGGTTTT |
| | | (SEQ ID NO: 1035) |
| 391 | (SEQ ID NO: 28) | GGGCGCGTACGGTTAT |
| | | (SEQ ID NO: 1036) |
| 392 | (SEQ ID NO: 28) | AGTTGGGTGTGTATGG |
| | | (SEQ ID NO: 1037) |
| 393 | (SEQ ID NO: 28) | TTATCGCGCGTGGAGG |
| | | (SEQ ID NO: 1038) |
| 394 | (SEQ ID NO: 28) | TTATTGTGTGTGGAGGA |
| | | (SEQ ID NO: 1039) |
| 395 | (SEQ ID NO: 37) | AAAACGTGGACGTTTT |
| | | (SEQ ID NO: 1153) |
| 396 | (SEQ ID NO: 37) | ATTTGGAGCGAGGAATTT |
| | | (SEQ ID NO: 1154) |
| 397 | (SEQ ID NO: 37) | ATTTGGAGTGAGGAATTT |
| | | (SEQ ID NO: 1155) |
| 398 | (SEQ ID NO: 37) | TTGAAAGTCGGTTAAAGT |
| | | (SEQ ID NO: 1156) |
| 399 | (SEQ ID NO: 37) | TTGAAAGTTGGTTAAAGT |
| | | (SEQ ID NO: 1157) |
| 400 | (SEQ ID NO: 37) | GGTAGTTACGAGAGAGTT |
| | | (SEQ ID NO: 1158) |
| 401 | (SEQ ID NO: 37) | GGTAGTTATGAGAGAGTT |
| | | (SEQ ID NO: 1159) |
| 402 | (SEQ ID NO: 26) | GGTGCGCGTAGAGAAT |
| | | (SEQ ID NO: 1040) |
| 403 | (SEQ ID NO: 26) | GGTGTGTGTAGAGAATA |
| | | (SEQ ID NO: 1041) |
| 404 | (SEQ ID NO: 26) | TAAGCGTATCGACGTT |
| | | (SEQ ID NO: 1042) |
| 405 | (SEQ ID NO: 26) | ATTTTAAGTGTATTGATGT |
| | | (SEQ ID NO: 1043) |
| 406 | (SEQ ID NO: 26) | AAATATCGAACGGGAT |
| | | (SEQ ID NO: 1044) |
| 407 | (SEQ ID NO: 26) | ATTGAATGGGATTTAGAG |
| | | (SEQ ID NO: 1045) |
| 408 | (SEQ ID NO: 26) | TTAGAGTTCGAGTTTATA |
| | | (SEQ ID NO: 1046) |
| 409 | (SEQ ID NO: 26) | TTAGAGTTTGAGTTTATA |
| | | (SEQ ID NO: 1047) |
| 410 | (SEQ ID NO: 26) | TTAGGCGCGGATTCGT |
| | | (SEQ ID NO: 1048) |
| 411 | (SEQ ID NO: 26) | TAGGTGTGGATTTGTT |
| | | (SEQ ID NO: 1049) |
| 412 | (SEQ ID NO: 26) | TTCGCGAAGTTACGGG |
| | | (SEQ ID NO: 1050) |
| 413 | (SEQ ID NO: 26) | TTTGTGAAGTTATGGGT |
| | | (SEQ ID NO: 1051) |
| 414 | (SEQ ID NO: 26) | TATCGGTTCGGAGTTA |
| | | (SEQ ID NO: 1052) |
| 415 | (SEQ ID NO: 26) | ATTGGTTTGGAGTTAGA |
| | | (SEQ ID NO: 1053) |
| 416 | (SEQ ID NO: 26) | AAGTAGCGTCGTTATT |
| | | (SEQ ID NO: 1054) |
| 417 | (SEQ ID NO: 26) | AAGTAGTGTTGTTATTGA |
| | | (SEQ ID NO: 1055) |
| 418 | (SEQ ID NO: 26) | GTCGTTCGGAATTCGT |
| | | (SEQ ID NO: 1056) |
| 419 | (SEQ ID NO: 26) | AGTTGTTTGGAATTTGT |
| | | (SEQ ID NO: 1057) |
| 420 | (SEQ ID NO: 26) | TACGTGGTCGAGGGTT |
| | | (SEQ ID NO: 1058) |
| 421 | (SEQ ID NO: 26) | TATGTGGTTGAGGGTT |
| | | (SEQ ID NO: 1059) |
| 422 | (SEQ ID NO: 26) | GGAAGTTTCGATGGTTTA |
| | | (SEQ ID NO: 1060) |
| 423 | (SEQ ID NO: 26) | GGAAGTTTTGATGGTTTA |
| | | (SEQ ID NO: 1061) |
| 424 | (SEQ ID NO: 38) | GGCGTTGGTATCGTTGA |
| | | (SEQ ID NO: 1062) |
| 425 | (SEQ ID NO: 38) | GGTGTTGGTATTGTTGA |
| | | (SEQ ID NO: 1063) |
| 426 | (SEQ ID NO: 38) | TTAAGACGCGTTTTTT |
| | | (SEQ ID NO: 1064) |
| 427 | (SEQ ID NO: 38) | AAGATGTGTTTTTTGGA |
| | | (SEQ ID NO: 1065) |
| 428 | (SEQ ID NO: 38) | TTTTGTCGCGGGAATT |
| | | (SEQ ID NO: 1066) |
| 429 | (SEQ ID NO: 38) | TTTTTGTTGTGGGAATT |
| | | (SEQ ID NO: 1067) |
| 430 | (SEQ ID NO: 38) | ATACGTAGATTCGGAG |
| | | (SEQ ID NO: 1068) |
| 431 | (SEQ ID NO: 38) | TATGTAGATTTGGAGGT |
| | | (SEQ ID NO: 1069) |
| 432 | (SEQ ID NO: 39) | GAAGTGGTCGTTAGTTTT |
| | | (SEQ ID NO: 1070) |
| 433 | (SEQ ID NO: 39) | GAAGTGGTTGTTAGTTTTT |
| | | (SEQ ID NO: 1071) |
| 434 | (SEQ ID NO: 39) | AAGGAATTCGTTTTGTAA |
| | | (SEQ ID NO: 1072) |
| 435 | (SEQ ID NO: 39) | AAGGAATTTGTTTTGTAA |
| | | (SEQ ID NO: 1073) |
| 436 | (SEQ ID NO: 39) | AATGTTTTCGTGATGTTG |
| | | (SEQ ID NO: 1074) |
| 437 | (SEQ DD NO: 39) | AATGTTTTTGTGATGTTG |
| | | (SEQ ID NO: 1075) |
| 438 | (SEQ ID NO: 39) | TAAAACGAGGGAGCGT |
| | | (SEQ ID NO: 1076) |
| 439 | (SEQ ID NO: 39) | AAAATGAGGGAGTGTT |
| | | (SEQ ID NO: 1077) |
| 440 | (SEQ ID NO: 27) | AGGAGTCGGTTTCGTA |
| | | (SEQ ID NO: 1078) |
| 441 | (SEQ ID NO: 27) | AGGAGTTGGTTTTGTA |
| | | (SEQ ID NO: 1079) |
| 442 | (SEQ ID NO: 27) | TAAAGCGCGGATATTT |
| | | (SEQ ID NO: 1080) |
| 443 | (SEQ ID NO: 27) | GGGTAAAGTGTGGATA |
| | | (SEQ ID NO: 1081) |
| 444 | (SEQ ID NO: 27) | TTTGAGCGGGTATCGA |
| | | (SEQ ID NO: 1082) |
| 445 | (SEQ ID NO: 27) | TGAGTGGGTATTGAGT |
| | | (SEQ ID NO: 1083) |
| 446 | (SEQ ID NO: 27) | TAGAGTCGAGGGGCGG |
| | | (SEQ ID NO: 1084) |
| 447 | (SEQ ID NO: 27) | TAGAGTTGAGGGGTGG |
| | | (SEQ ID NO: 1085) |
| 448 | (SEQ ID NO: 27) | TTTCGAGGGACGGAAG |
| | | (SEQ ID NO: 1086) |
| 449 | (SEQ ID NO: 27) | TTTTGAGGGATGGAAG |
| | | (SEQ ID NO: 1087) |
| 450 | (SEQ ID NO: 27) | TATGTTTTCGGCGAAT |
| | | (SEQ ID NO: 1088) |
| 451 | (SEQ ID NO: 27) | TTTTGGTGAATGGGGA |
| | | (SEQ ID NO: 1089) |
| 452 | (SEQ ID NO: 27) | ATAGTCGAGGAGTCGT |
| | | (SEQ ID NO: 1090) |
| 453 | (SEQ ID NO: 27) | AATAGTTGAGGAGTTGT |
| | | (SEQ ID NO: 1091) |
| 454 | (SEQ ID NO: 29) | ATTTGTTTCGATTAATTT |
| | | (SEQ ID NO: 1092) |
| 455 | (SEQ ID NO: 29) | ATTTGTTTTGATTAATTT |
| | | (SEQ ID NO: 1093) |
| 456 | (SEQ ID NO: 29) | AATTTGCGAACGTTTGGG |
| | | (SEQ ID NO: 1094) |
| 457 | (SEQ ID NO: 29) | AATTTGTGAATGTTTGGG |
| | | (SEQ ID NO: 1095) |
| 458 | (SEQ ID NO: 29) | GTCGATGTTTTCGGTA |
| | | (SEQ ID NO: 1096) |
| 459 | (SEQ ID NO: 29) | GGTTGATGTTTTTGGTA |
| | | (SEQ ID NO: 1097) |
| 460 | (SEQ ID NO: 31) | GAGTTTCGTTATATCGT |
| | | (SEQ ID NO: 1098) |
| 461 | (SEQ ID NO: 31) | GGAGTTTTGTTATATTGT |
| | | (SEQ ID NO: 1099) |
| 462 | (SEQ ID NO: 31) | TTTTTGCGGTTCGATA |
| | | (SEQ ID NO: 1100) |
| 463 | (SEQ ID NO: 31) | AATTTTTGTGGTTTGATA |
| | | (SEQ ID NO: 1101) |
| 464 | (SEQ ID NO: 31) | TACGTTAAGGTTAACGTATA |
| | | (SEQ ID NO: 1102) |
| 465 | (SEQ ID NO: 31) | TATGTTAAGGTTAATGTATA |
| | | (SEQ ID NO: 1103) |
| 466 | (SEQ ID NO: 31) | TGTTTCGTCGTTATAAT |
| | | (SEQ ID NO: 1104) |
| 467 | (SEQ ID NO: 31) | GTTTTGTTGTTATAATTAGA |
| | | (SEQ ID NO: 1105) |
| 468 | (SEQ ID NO: 31) | GGCGTAGGTTACGATT |
| | | (SEQ ID NO: 1106) |
| 469 | (SEQ ID NO: 31) | GGGGTGTAGGTTATGA |
| | | (SEQ ID NO: 1107) |
| 470 | (SEQ ID NO: 31) | ATTCGTTACGGATCGT |
| | | (SEQ ID NO: 1108) |
| 471 | (SEQ ID NO: 31) | TTTATTTGTTATGGATTGT |
| | | (SEQ ID NO: 1109) |
| 472 | (SEQ ID NO: 31) | AGTTTTCGGATTCGAA |
| | | (SEQ ID NO: 1110) |
| 473 | (SEQ ID NO: 31) | AGAGTTTTTGGATTTGA |
| | | (SEQ ID NO: 1111) |
| 474 | (SEQ ID NO: 31) | TATTTCGAGGTAGCGG |
| | | (SEQ lD NO: 1112) |
| 475 | (SEQ ID NO: 31) | TTTGAGGTAGTGGGAT |
| | | (SEQ ID NO: 1113) |
| 476 | (SEQ ID NO: 31) | GAGAGAAACGGTTTTTGT |
| | | (SEQ ID NO: 1114) |
| 477 | (SEQ ID NO: 31) | GAGAGAAATGGTTTTTGT |
| | | (SEQ ID NO: 1115) |
| 478 | (SEQ ID NO: 31) | GTTTGATGGATGTTTTT |
| | | (SEQ ID NO: 1116) |
| 479 | (SEQ ID NO: 31) | GTACGACGGTAAGGAT |
| | | (SEQ ID NO: 1117) |
| 480 | (SEQ ID NO: 31) | GTATGATGGTAAGGATTA |
| | | (SEQ ID NO: 1118) |
| 481 | (SEQ ID NO: 31) | AGTTGTTTCGTAGATATT |
| | | (SEQ ID NO: 1119) |
| 482 | (SEQ ID NO: 31) | AGTTGTTTTGTAGATATT |
| | | (SEQ ID NO: 1120) |
| 483 | (SEQ ID NO: 40) | AGTAAGCGGTTGTATAT |
| | | (SEQ ID NO: 1121) |
| 484 | (SEQ ID NO: 40) | AAAAGTAAGTGGTTGTAT |
| | | (SEQ ID NO: 1122) |
| 485 | (SEQ ID NO: 40) | AAATTGAGCGTTTATGT |
| | | (SEQ ID NO: 1123) |
| 486 | (SEQ ID NO: 40) | ATTGAGTGTTTATGTGTA |
| | | (SEQ ID NO: 1124) |

TABLE 3
Genes or genomic locus associated with genomic sequences
according to SEQ ID NO 1-SEQ ID NO 64.

| Genomic | | | |
|---|---|---|---|
| SEQ ID | Bisulfite SEQ ID | Genbank Ref. ID | |
| NO: | Nos: | No:/contig | Description |
| 1 | 304, 305, 420 & | AL355481.12.1.122435 | Hypothetical protein-leucine rich repeat |
| | 421 | | (Vega gene ID |
| | | | OTTHUMG00013001328) |
| 2 | 306. 307, 422 & | AC027601.25.1.192732 | 5 azacytidine induced (Ensembl gene ID |
| | 423 | | 141577) |
| 3 | 308, 309, 424 & | AL831711.4.1.8801 | No known gene, close to ATP/GTP- |
| | 425 | | binding site motif A (P-loop) protein |
| 4 | 310, 311, 426 & | NM_002938 | RING FINGER PROTEIN 4; RNF4 |
| | 427 | | |
| 5 | 312, 313, 428 & | NM_021926 | HOMEOBOX PROTEIN ARISTALESS- |
| | 429 | | LIKE 4;. ALX 4 |
| 6 | 314, 315, 430 & | NM_004852 | ONE CUT DOMAIN FAMILY MEMBER |
| | 431 | | 2; ONC2 |
| 7 | 316, 317, 432 & | NM_002507 | TUMOR NECROSIS FACTOR |
| | 433 | | RECEPTOR SUPERFAMILY MEMBER |
| | | | 16 PRECURSOR (LOW-AFFINITY |
| | | | NERVE GROWTH FACTOR |
| | | | RECEPTOR) (NGF RECEPTOR) (GP80- |
| | | | LNGFR) (P75 ICD) (LOW AFFINITY |
| | | | NEUROTROPHIN RECEPTOR |
| | | | P75NTR). NGFR |
| 8 | 318, 319, 434 & | NM_016192 | TRANSMEMBRANE PROTEIN WITH |
| | 435 | | EGF-LIKE AND TWO FOLLISTATIN- |
| | | | LIKE DOMAINS 2; |
| | | | TRANSMEMBRANE PROTEIN TENB2; |
| | | | TOMOREGULIN; PUTATIVE |
| | | | TRANSMEMBRANE PROTEIN WITH |
| | | | EGF-LIKE AND TWO FOLLISTATIN- |
| | | | LIKE DOMAINS 2. |
| 9 | 320, 321, 436 & | NM_005221 | HOMEOBOX PROTEIN DLX-5 |
| | 437 | | |
| 10 | 322, 323, 438 & | NM_080552 | VESICULAR INHIBITORY AMINO |
| | 439 | | ACID TRANSPORTER (GABA AND |
| | | | GLYCINE TRANSPORTER) |
| | | | (VESICULAR GABA TRANSPORTER) |
| | | | (HVIAAT) |
| 11 | 324, 325, 440 & | NM_001208 | Transcription factor BTF3 Homolog 1 |
| | 441 | | |
| 12 | 326, 327, 442 & | NM_005904 | MOTHERS AGAINST |
| | 443 | | DECAPENTAPLEGIC HOMOLOG 7 |
| | | | (SMAD 7) (MOTHERS AGAINST DPP |
| | | | HOMOLOG 7) (SMAD7) (HSMAD7). |
| 13 | 328, 329, 444 & | NM_002146 | HOMEOBOX PROTEIN HOX-B3 (HOX- |
| | 445 | | 2G) (HOX-2.7) |
| 14 | 330, 331, 446 & | NM_025078 | Homo sapiens hypothetical protein |
| | 447 | | FLJ22378 |
| 15 | 332, 333, 448 & | NM_001116 | ADENYLATE CYCLASE, TYPE IX (EC |
| | 449 | | 4.6.1.1) (ATP PYROPHOSPHATE- |
| | | | LYASE) (ADENYLYL CYCLASE). |
| | | | ADCY9 |
| 16 | 334, 335, 450 & | NM_001706 | B-CELL LYMPHOMA 6 PROTEIN |
| | 451 | | (BCL-6) (ZINC FINGER PROTEIN 51) |
| | | | (LAZ-3 PROTEIN) (BCL-5). |
| 17 | 336, 337, 452 & | NM_014068 | SEEK1 PROTEIN |
| | 453 | | |
| 18 | 338, 339, 454 & | NM_017745 | BCL-6 INTERACTING COREPRESSOR |
| | 455 | | ISOFORM 1 BCOR |
| 19 | 340, 341, 456 & | NM_005643 | TRANSCRIPTION INITIATION |
| | 457 | | FACTOR TFIID 28 KDA SUBUNIT |
| | | | (TAFII-28) (TAFII28) (TFIID SUBUNIT |
| | | | P30-BETA) |
| 20 | 342, 343, 458 & | NM_007374 | HOMEOBOX PROTEIN SIX6 (SINE |
| | 459 | | OCULIS HOMEOBOX HOMOLOG 6) |
| | | | (OPTIC HOMEOBOX 2) |
| | | | (HOMEODOMAIN PROTEIN OPTX2). |
| 21 | 344, 345, 460 & | AP003500.2.1.161078 | Situated between Ensemble gene IDs |
| | 461 | | ENSESTG00002308609 and |
| | | | ENSESTG00002308691 |
| 22 | 346, 347, 462 & | AC092385.4.1.97218 | SPIR-2 PROTEIN (FRAGMENT) |
| | 463 | | |
| 23 | 348, 349, 464 & | AC007223.5.1.159520 | Situated within Ensemble EST ID |
| | 465 | | ENSESTG00001971415 |
| 24 | 350, 351, 466 & | NM_005229 | ETS-DOMAIN PROTEIN ELK-1 |
| | 467 | | |
| 25 | 352, 353, 468 & | NM_000179 | DNA MISMATCH REPAIR PROTEIN |
| | 469 | | MSH6 (MUTS-ALPHA 160 KDA |
| | | | SUBUNIT) (G/T MISMATCH BINDING |
| | | | PROTEIN) (GTBP) (GTMBP) (P160) |
| 26 | 354, 355, 470 & | NM_005427 | TUMOR PROTEIN P73 (P53-LIKE |
| | 471 | | TRANSCRIPTION FACTOR) (P53- |
| | | | RELATED PROTEIN). |
| 27 | 356, 357, 472 & | NM_002093 | GLYCOGEN SYNTHASE KINASE-3 |
| | 473 | | BETA (EC 2.7.1.37) (GSK-3 BETA). |
| 28 | 358, 359, 474 & | NM_006765 | N33 PROTEIN |
| | 475 | | |
| 29 | 360, 361, 476 & | NM_016192 | TRANSMEMBRANE PROTEIN WITH |
| | 477 | | EGF-LIKE AND TWO FOLLISTATIN- |
| | | | LIKE DOMAINS 2; |
| | | | TRANSMEMBRANE PROTEIN TENB2; |
| | | | TOMOREGULIN; PUTATIVE |
| | | | TRANSMEMBRANE PROTEIN WITH |
| | | | EGF-LIKE AND TWO FOLLISTATIN- |
| | | | LIKE DOMAINS 2. |
| 30 | 362, 363, 478 & | NM_004429 | EPHRIN-B1 PRECURSOR (EPH- |
| | 479 | | RELATED RECEPTOR TYROSINE |
| | | | KINASE LIGAND 2) (LERK-2) (ELK |
| | | | LIGAND) (ELK-L). |
| 31 | 364, 365, 480 & | NM_018950 | HLA-F gene for human leukocyte antigen F |
| | 481 | | |
| 32 | 366, 367, 482 & | NM_000038 | ADENOMATOUS POLYPOSIS COLI |
| | 483 | | PROTEIN (APC PROTEIN) |
| 33 | 368, 369, 484 & | NM_000610 | CD44 ANTIGEN PRECURSOR |
| | 485 | | (PHAGOCYTIC GLYCOPROTEIN I) |
| | | | (PGP-1) (HUTCH-I) |
| | | | (EXTRACELLULAR MATRIX |
| | | | RECEPTOR-III) (ECMR-III) (GP90 |
| | | | LYMPHOCYTE HOMING/ADHESION |
| | | | RECEPTOR) (HERMES ANTIGEN) |
| | | | (HYALURONATE RECEPTOR) |
| | | | (HEPARAN SULFATE |
| | | | PROTEOGLYCAN) (EPICAN) (CDW44) |
| 34 | 370, 371, 486 & | NM_004385 | VERSICAN CORE PROTEIN |
| | 487 | | PRECURSOR (LARGE FIBROBLAST |
| | | | PROTEOGLYCAN) (CHONDROITIN |
| | | | SULFATE PROTEOGLYCAN CORE |
| | | | PROTEIN 2) (PG-M) (GLIAL |
| | | | HYALURONATE-BINDING PROTEIN) |
| | | | (GHAP) CSPG2 |
| 35 | 372, 373, 488 & | | EYA 4 EnsEMBL ID ENSG00000112319 |
| | 489 | | |
| 36 | 374, 375, 490 & | NM_000455 | SERINE/THREONINE-PROTEIN |
| | 491 | | KINASE 11 (EC 2.7.1.—) |
| | | | (SERINE/THREONINE-PROTEIN |
| | | | KINASE LKB1) |
| 37 | 376, 377, 492 & | NM_003242 | Transforming growth factor, beta receptor |
| | 493 | | II (TGFBR2) |
| 38 | 378, 379, 494 & | NM_001753 | CAVEOLIN-1; CAV 1 |
| | 495 | | |
| 39 | 380, 381, 496 & | NM_001257 | CADHERIN-13 PRECURSOR |
| | 497 | | (TRUNCATED-CADHERIN) (T- |
| | | | CADHERIN) (T-CAD) (HEART- |
| | | | CADHERIN) (H-CADHERIN) (P105) |
| 40 | 382, 383, 498 & | NM_000044 | ANDROGEN RECEPTOR |
| | 499 | | (DIHYDROTESTOSTERONE |
| | | | RECEPTOR) AR |
| 41 | 384, 385, 500 & | NM_032546 | RING FINGER PROTEIN 30, RNF 30, |
| | 501 | | |
| 42 | 386, 387, 502 & | NM_033178 | DOUBLE HOMEOBOX, 4; DOUBLE |
| | 503 | | HOMEOBOX PROTEIN 4. DUX4 |
| 43 | 388, 389, 504 & | NM_003573 | LATENT TRANSFORMING GROWTH |
| | 505 | | FACTOR BETA BINDING PROTEIN 4.; |
| | | | LTBP4 |
| 44 | 390, 391, 506 & | | CGI-20 PROTEIN |
| | 507 | | |
| 45 | 392, 393, 508 & | NM_014459 | PROTOCADHERIN 17; |
| | 509 | | PROTOCADHERIN 68.; PCDH 17 |
| 46 | 394, 395, 510 & | NM_005285 | PROBABLE G PROTEIN-COUPLED |
| | 511 | | RECEPTOR GPR7.; GPR7 |
| 47 | 396, 397, 512 & | NM_016269 | LYMPHOID ENHANCER BINDING |
| | 513 | | FACTOR 1 (LEF-1) (T CELL-SPECIFIC |
| | | | TRANSCRIPTION FACTOR 1-ALPHA) |
| | | | (TCF1-ALPHA) |
| 48 | 398, 399, 514 & | AC139426.2.1.188448 | Situated between EnsEMBL ID |
| | 515 | | ENSESTG00003302072 and EnsEMBL ID |
| | | | ENSESTG00003302068 |
| 49 | 400, 401, 516 & | NM_005904 | MOTHERS AGAINST |
| | 517 | | DECAPENTAPLEGIC HOMOLOG 7 |
| | | | (SMAD 7) (MOTHERS AGAINST DPP |
| | | | HOMOLOG 7) (SMAD7) (HSMAD7). |
| 50 | 402, 403, 518 & | AL512590.2.1.165432 | Homo sapiens mRNA for KIAA1529 |
| | 519 | | protein EnsEMBL ID ENSG00000029402 |
| 51 | 404, 405, 520 & | NM_001866 | COX7B |
| | 521 | | |
| 52 | 406, 407, 522 & | NM_001900 | CST5 |
| | 523 | | |
| 53 | 408, 409, 524 & | NM_001990 | EYES ABSENT HOMOLOG 3. EYA3 |
| | 525 | | |
| 54 | 410, 411, 526 & | NM_002032 | FERRITIN HEAVY CHAIN (FERRITIN |
| | 527 | | H SUBUNIT). FTH1. |
| 55 | 412, 413, 528 & | NM_002938 | RING FINGER PROTEIN 4.; RNF4 |
| | 529 | | |
| 56 | 414, 415, 530 & | | HPP1 EnsEMBL ID ENSG00000144339 |
| | 531 | | |
| 57 | 416, 417, 532 & | NM_000852 | GLUTATHIONE S-TRANSFERASE P |
| | 533 | | (EC 2.5.1.18) (GST CLASS-PI) (GSTP1- |
| | | | 1) |
| 58 | 418, 419, 534 & | NM_007084 | TRANSCRIPTION FACTOR SOX-21 |
| | 535 | | |
| 59 | 65, 66, 77 & 78 | NM_003299 | |
| 60 | 67, 68, 79 & 80 | NM_025218 | |
| 61 | 69, 70, 81 & 82 | NM_001374 | |
| 62 | 71, 72, 83 & 84 | NM_003714 | |
| 63 | 73, 74, 85 & 86 | NM_002196 | |
| 64 | 75, 76, 87 & 88 | NM_000484 | |

1-51. (canceled)

52. A method for determining CpG methylation status of NGFR in colon cell genomic DNA in a human subject comprising the steps of:
a) obtaining from the human subject a biological sample comprising colon cell genomic DNA, the biological sample selected from the group consisting of blood plasma, blood serum, whole blood, stool, colonic effluent, colon tissue, and colon cells;
b) treating the colon cell genomic DNA, or a fragment thereof, with one or more reagents to convert cytosine bases that are unmethylated in the 5′-position thereof to uracil or to another base that is detectably dissimilar to cytosine in terms of hybridization properties;
c) contacting the treated colon cell genomic DNA of b), or the treated fragment thereof, within NGFR gene sequence (SEQ ID NO: 7) with an amplification enzyme and at least two primers that are complementary to, or hybridize under moderately stringent or stringent conditions to, a sequence selected from the group consisting of SEQ ID NOs: 316, 317, 432, and 433, and complements thereof, wherein the treated colon cell genomic DNA or the fragment thereof is either amplified to produce at least one amplificate, or is not amplified; and
d) determining the methylation state of at least one CpG dinucleotide of a sequence selected within NGFR gene sequence SEQ ID NO: 7, based on
a presence or absence of the at least one amplificate or on a property of the at least one amplificate, or
an average methylation state or a value reflecting an average methylation state of a plurality of CpG dinucleotides within the NGFR gene sequence according to SEQ ID NO: 7.

53. The method of claim 52, wherein treating the colon cell genomic DNA, or the fragment thereof, comprises use of at least one reagent selected from the group consisting of bisulfite, hydrogen sulfite, and disulfite.

54. The method of claim 52, wherein the amplification enzyme in step c) is a heat resistant DNA polymerase or a polymerase lacking 5′-3′ exonuclease activity or
wherein the generation of the at least one amplificate comprises the generation of an amplificate carrying a detectable label.

55. The method of claim 53, wherein the detectable label is selected from the label group consisting of: fluorescent labels; radionuclides or radiolabels; amplificate mass labels detectable in a mass spectrometer; detachable amplificate fragment mass labels detectable in a mass spectrometer; amplificate and detachable amplificate fragment mass labels having a single-positive or single-negative net charge detectable in a mass spectrometer; and combinations thereof.

56. The method of claim 52, wherein the biological sample obtained from the subject is selected from the group consisting of: cell lines; histological slides; biopsies; paraffin-embedded tissue; bodily fluids; cells isolated from blood; and combinations thereof.

57. The method of claim 52 further comprising contacting the treated colon cell genomic DNA with an oligonucleotide comprising at least 9 contiguous nucleotides of a nucleic acid sequence selected from the group consisting of SEQ ID NOs: 316, 317, 432, and 433, wherein the oligonucleotide suppresses amplification of a nucleic acid to which it is hybridized.

58. The method of claim 57, wherein the nucleic acid sequence of the oligonucleotide is selected from the group consisting of SEQ ID NOs: 4651, 4654, 4657, 4673, 4679, 4682, 4692, 4698, 4710, 4712, 4713, 4723, 4725, 4729, 4734, 4740, 4743, 4747, 4752, 4757, 4762, 4765, 4775, 4781, 4796, 4799, 4803, 4809, 4826, 4831, 4863, 4866, 4880, 4888, 4914, 4916, 4931, 4933, and 4939.

59. The method of claim 57, wherein the oligonucleotide is modified at its 5′ end to preclude degradation of the oligonucleotide by an enzyme having 5′-3′ exonuclease activity.

60. The method of claim 57, wherein the oligonucleotide lacks a 3′ hydroxyl group.

61. The method of claim 57, wherein the amplification enzyme is a polymerase lacking 5′-3′ exonuclease activity.

62. The method of claim 52 further comprising hybridizing at least one nucleic acid molecule or peptide nucleic acid molecule to the at least one amplificate generated in step c), thereby producing hybridized nucleic acid molecules or peptide nucleic acid molecules,
wherein the at least one nucleic acid molecule or peptide nucleic acid molecule comprises a contiguous sequence of at least 9 nucleotides in length and can cover at least one CpG dinucleotide within SEQ ID NO:7.

63. The method of claim 62, wherein the at least one nucleic acid molecule or peptide nucleic acid is selected from the group consisting of SEQ ID NOs: 4651, 4654, 4657, 4673, 4679, 4682, 4692, 4698, 4710, 4712, 4713, 4723, 4725, 4729, 4734, 4740, 4743, 4747, 4752, 4757, 4762, 4765, 4775, 4781, 4796, 4799, 4803, 4809, 4826, 4831, 4863, 4866, 4880, 4888, 4914, 4916, 4931, 4933, and 4939.

64. The method of claim 62, wherein at least one of the hybridized nucleic acid molecules or peptide nucleic acid molecules is bound to a solid phase.

65. The method of claim 62, wherein the hybridized nucleic acid molecules or peptide nucleic acid molecules are bound to a solid phase in the form of a nucleic acid or peptide nucleic acid array selected from the array group consisting of a substantially linear array, a substantially hexagonal array, a substantially rectangular array, and combinations thereof.

66. The method of claim 62, further comprising extending at least one of the hybridized nucleic acid molecules or peptide nucleic acid molecules by at least one nucleotide base.

67. The method of claim 52, further comprising sequencing of the at least one amplificate.

68. The method of claim 52, wherein the primers are methylation-specific primers.

69. The method of claim 66, wherein the sequence of the methylation-specific primers is selected from the group consisting of SEQ ID NOs: 4649, 4652, 4655, 4659, 4661, 4663, 4664, 4665, 4668, 4671, 4674, 4675, 4676, 4678, 4680, 4683, 4686, 4690, 4696, 4700, 4703, 4704, 4706, 4709, 4711, 4714, 4715, 4717, 4718, 4719, 4720, 4721, 4726, 4727, 4730, 4732, 4738, 4742, 4745, 4749, 4750, 4753, 4755, 4759, 4763, 4768, 4769, 4772, 4773, 4776, 4778, 4779, 4782, 4784, 4789, 4790, 4794, 4797, 4801, 4805, 4807, 4813, 4814, 4819, 4821, 4822, 4827, 4829, 4833, 4834, 4835, 4837, 4838, 4841, 4842, 4843, 4844, 4847, 4849, 4850, 4852, 4853, 4859, 4860, 4861, 4865, 4867, 4868, 4869, 4870, 4873, 4876, 4877, 4878, 4879, 4883, 4885, 4889, 4891, 4892, 4894, 4895, 4897, 4898, 4903, 4906, 4911, 4912, 4918, 4919, 4920, 4924, 4927, 4929, 4932, 4934, 4941, 4942, 4945, 4948, 4949, 4950, 4650, 4653, 4656, 4658, 4660, 4662, 4666, 4667, 4669, 4670, 4672, 4677, 4681, 4684, 4685, 4687, 4688, 4689, 4691, 4693, 4694, 4695, 4697, 4699, 4701, 4702, 4705, 4707, 4708, 4716, 4722, 4724, 4728, 4731, 4733, 4735, 4736, 4737, 4739, 4741, 4744, 4746, 4748, 4751, 4754, 4756, 4758, 4760, 4761, 4764, 4766, 4767, 4770, 4771, 4774, 4777, 4780, 4783, 4785, 4786, 4787, 4788, 4791, 4792, 4793, 4795, 4798, 4800, 4802, 4804, 4806, 4808, 4810, 4811, 4812, 4815, 4816, 4817, 4818, 4820, 4823, 4824, 4825, 4828, 4830, 4832, 4836, 4839, 4840, 4845, 4846, 4848, 4851, 4854, 4855, 4856, 4857, 4858, 4862, 4864, 4871, 4872, 4874, 4875, 4881, 4882, 4884, 4886, 4887, 4890, 4893, 4896, 4899, 4900, 4901, 4902, 4904, 4905, 4907, 4908, 4909, 4910, 4913, 4915, 4917, 4921, 4922, 4923, 4925, 4926, 4928, 4930, 4935, 4936, 4937, 4938, 4940, 4943, 4944, 4946, 4947, 4951, and 4952.

70. The method of claim 52, wherein the primers are oligonucleotides comprising one or more CpG, TpG, or CpA dinucleotides.

71. The method of claim 70, wherein the primers are selected from the group consisting SEQ ID NOs: 4649, 4652, 4655, 4659, 4661, 4663, 4664, 4665, 4668, 4671, 4674, 4675, 4676, 4678, 4680, 4683, 4686, 4690, 4696, 4700, 4703, 4704, 4706, 4709, 4711, 4714, 4715, 4717, 4718, 4719, 4720, 4721, 4726, 4727, 4730, 4732, 4738, 4742, 4745, 4749, 4750, 4753, 4755, 4759, 4763, 4768, 4769, 4772, 4773, 4776, 4778, 4779, 4782, 4784, 4789, 4790, 4794, 4797, 4801, 4805, 4807, 4813, 4814, 4819, 4821, 4822, 4827, 4829, 4833, 4834, 4835, 4837, 4838, 4841, 4842, 4843, 4844, 4847, 4849, 4850, 4852, 4853, 4859, 4860, 4861, 4865, 4867, 4868, 4869, 4870, 4873, 4876, 4877, 4878, 4879, 4883, 4885, 4889, 4891, 4892, 4894, 4895, 4897, 4898, 4903, 4906, 4911, 4912, 4918, 4919, 4920, 4924, 4927, 4929, 4932, 4934, 4941, 4942, 4945, 4948, 4949, 4950, 4650, 4653, 4656, 4658, 4660, 4662, 4666, 4667, 4669, 4670, 4672, 4677, 4681, 4684, 4685, 4687, 4688, 4689, 4691, 4693, 4694, 4695, 4697, 4699, 4701, 4702, 4705, 4707, 4708, 4716, 4722, 4724, 4728, 4731, 4733, 4735, 4736, 4737, 4739, 4741, 4744, 4746, 4748, 4751, 4754, 4756, 4758, 4760, 4761, 4764, 4766, 4767, 4770, 4771, 4774, 4777, 4780, 4783, 4785, 4786, 4787, 4788, 4791, 4792, 4793, 4795, 4798, 4800, 4802, 4804, 4806, 4808, 4810, 4811, 4812, 4815, 4816, 4817, 4818, 4820, 4823, 4824, 4825, 4828, 4830, 4832, 4836, 4839, 4840, 4845, 4846, 4848, 4851, 4854, 4855, 4856, 4857, 4858, 4862, 4864, 4871, 4872, 4874, 4875, 4881, 4882, 4884, 4886, 4887, 4890, 4893, 4896, 4899, 4900, 4901, 4902, 4904, 4905, 4907, 4908, 4909, 4910, 4913, 4915, 4917, 4921, 4922, 4923, 4925, 4926, 4928, 4930, 4935, 4936, 4937, 4938, 4940, 4943, 4944, 4946, 4947, 4951, and 4952.

72. The method of claim 52 further comprising hybridizing at least one detectably labeled nucleic acid molecule comprising a contiguous sequence at least 9 nucleotides in length that is complementary to, or hybridizes under stringent conditions to a sequence selected from the group consisting of SEQ ID NOs: 316, 317, 432, and 433, and
wherein the primers are oligonucleotides comprising one or more CpG, TpG, or CpA dinucleotides.

73. The method of claim 52, further comprising:
hybridizing a blocking probe to a sequence selected from the group consisting of SEQ ID NOs: 316, 317, 432, and 433, and complements thereof, the blocking probe comprising a nucleic acid molecule or peptide nucleic acid molecule at least 9 nucleotides in length, wherein the blocking probe suppresses amplification of the nucleic acid to which it is hybridized; and
hybridizing at least one detectably labeled nucleic acid molecule to a sequence selected from the group consisting of SEQ ID NOs: 316, 317, 432, and 433, and complements thereof, wherein the detectably labeled nucleic acid molecule comprises a contiguous sequence of at least 9 nucleotides in length and can cover at least one CpG dinucleotide when hybridized to SEQ ID NO: 7.

74. The method of claim 52, wherein the human subject has a colon cell proliferative disorder.

75. A method for determining CpG methylation status of NGFR in colon cell genomic DNA in a human subject comprising:
a) obtaining a biological sample from the human subject, the biological sample comprising colon cell genomic DNA, the biological sample selected from the group consisting of blood plasma, blood serum, whole blood, stool, colonic effluent, colon tissue, and colon cells;
b) extracting, or otherwise isolating the colon cell genomic DNA from the biological sample;
c) contacting the colon cell genomic DNA, or a fragment thereof comprising at least 16 contiguous nucleotides of SEQ ID NO: 7, with one or more methylation-sensitive restriction enzymes, wherein the colon cell genomic DNA is either cleaved thereby to produce cleavage fragments, or not cleaved thereby; and
d) determining the CpG methylation status of SEQ ID NO: 7 based on
the presence or absence of at least one of the cleavage fragments produced in step c), or
an average methylation status or a value reflecting an average methylation status of a plurality of CpG dinucleotides of target CpG dinucleotide sequences within SEQ ID NO: 7.

76. The method of claim 75, wherein the human subject has a colon cell proliferative disorder.

77. A treated nucleic acid derived from genomic SEQ ID NO: 7, wherein the treatment is suitable to convert at least one unmethylated cytosine base of the genomic DNA sequence to uracil or another base that is detectably dissimilar to cytosine in terms of hybridization.

78. A nucleic acid comprising at least 16 contiguous nucleotides of a treated genomic DNA sequence selected from the group consisting of SEQ ID NOs: 316, 317, 432, and 433, and sequences complementary thereto, wherein the treatment is suitable to convert at least one unmethylated cytosine base of the genomic DNA sequence to uracil or another base that is detectably dissimilar to cytosine in terms of hybridization.

79. The nucleic acid of claim 77, wherein the at least 16 contiguous nucleotides of SEQ ID NO: 7 comprises at least one CpG, TpG, or CpA dinucleotide sequence.

80. The nucleic acid of claim 78, wherein the treatment comprises use of a reagent selected from the group consisting of bisulfite, hydrogen sulfite, disulfite, and combinations thereof.

81. An oligomer, comprising a sequence of at least 9 contiguous nucleotides that is complementary to, or hybridizes under stringent conditions to a treated genomic DNA sequence selected from the group consisting of SEQ ID NOs: 316, 317, 432, and 433.

82. The oligomer of claim 81, comprising at least one CpG, CpA or TpG dinucleotide sequence.

83. A kit comprising:
a methylation-sensitive restriction enzyme; and
at least one nucleic acid molecule or peptide nucleic acid molecule, comprising a contiguous sequence of at least 16 nucleotides that is complementary to, or hybridizes under moderately stringent or stringent conditions to a sequence selected from the group consisting of SEQ ID NO: 7, and complements thereof.

84. A kit comprising:
a bisulfite reagent; and
at least one nucleic acid molecule or peptide nucleic acid molecule, comprising a contiguous sequence of at least 16 nucleotides that is complementary to, or hybridizes under moderately stringent or stringent conditions to a sequence selected from the group consisting of SEQ ID NOS: 316, 317, 432, and 433, and complements thereof.

85. The kit of claim 84, further comprising standard reagents for performing a methylation assay selected from the group consisting of MS-SNuPE, MSP, MethyLight, HeavyMethyl, COBRA, nucleic acid sequencing, and combinations thereof.

86. The kit of claim 84, wherein the length of the contiguous nucleotide sequence is selected from the group consisting of at least 17, at least 18, at least 20, at least 22, at least 23, at least 25, at least 27, at least 30, and at least 35 nucleotides.

87. The kit of claim 84, wherein the length of the contiguous nucleotide sequence is at least 18 nucleotides.

The application's sequence listing, which the Patent Office published only in electronic form, follows.

SEQUENCE LISTING (14627 sequences)

SEQ ID NO: 1 - DNA, 2280 bp, Homo sapiens
accagcacagaattgctaccataggatcgcagcctaagcactagagtgacattaattggtcatgcttaactgcctcaaaatcattttttaaataattacactgatactataatagaaatcatgggtacttattttacattcagatggaaggcattattggatatgtattaaaaaaaagaccccctgaaaaaaataaaataaaataaaacatcaccatcaaaataaaagaacccaaaacaacccctaaaaacttccctcaacaaaatacattgttaactcataaaatggactgatgactagccatgcaaatgtcctaaataaaacctttacatttttttcacagttaacttatgctctgaactgcctaccgatcacaaataatggcgaaatggcactttctgattatactgtattttgtttatagaaagtttgatacgatggaacttatcaggtaagagggtgggtgctgtgaacgagatgccgtctccagtcgcgggggcgggcagagtccctggagcgcgtggattccatgcgagccatgcagcactttttgttttttgtcagaagtcaaagttacttatttacaatacattcatgccttcgtgcaactgcccatccctgcgtagccaacagggagccatcacggggctaatccacaggggaaaaatagatatctatctctctatatagatgtggatatatgtatatatgtatagaaccgcggcatccaaccccacaggccccggggccgagggcgagggcactgtcagttcttccagcagggtcgtgctgggctttctgtcaaaaggggctctcagcaaagagcgagctggctgcgctctcccagctctccacagtctgctctttgtttcaaggagggagctaagtaaggggtcaggccctttcggttgtgcgagctcacagttatttatctacttatgcccatccaggctgatggcgcggggatttgggtacacgcccctccagcccccggggtgcctgcggtggggaaggatgtatcgccttccctctgccctcccctattggggttggggtcttagtctgagagcgagtgagagccacagtcatacactctgtgggccccatctgcgttgtaaggcccattgtgccagtaggaagagtcacagactgtctgtagggaattaatctcggacgcggaggagttggcatctcgtctcttggaccgctttcggttcctcaggataaacacgagcatgcccaccacggtgaaggcggaggtgacaaacaccagcagcagtcccgggaccaacaccgagatggacaccctgctggtgtctaggtaggagttggagtgcgtcccggtctccgccaacccagtgctgtttttactgtgcgaagttaacgtgggcgagatcctagcgtacagctgagggcagatctcgtcattggagaggagcatgaaatcctttctaaagaagttcaccggcgtctcacacttgaggtcgctcatcagcacttcggaacccaagcgttctgcccactgcttgaaaggcacaattgtgcaggagcactcccaggggtttccgtggaggtctatctggatgatggaggttaactggtccagcacccctgccaccgggaggtacatgaagtaattgttgtgcaggctgagtttagagagcgagaccccagcgaacacgtccacaggcagggacctcagcaggttgttgttgagaatgaggatcctcagtttgggcatggcattgaaagtgcccgggaggatgagctggatagcgttgtactccacgttcaggtactctaggttttgcagccccgcgaatttctcccgggacagcgtgtccaggtaattgctatccatgtatagccacctgaggtccaaaaggttcttgaaagtgttgttctctacagtagcgatgttattgttgcccagatccaacagaatgaggttcttgtaatccacaaagtgcgattttcggatgctgtggatcttgttatctcgtaggaaaagctcctgcacgttagagagcttgggcttcaaatcagccaagctgctcacgttcctgttgttgcagttcatctttaaacccgaccctgggatgtggtcgcagctgcagcccccagggcagggtaaactgttagctaagggtttgttcctggagctacccgtcgctatcgctgctgtgggtctgattttgatctgccagttgcctgggatctttgtacctccgtttggagcagaccctggtgtggcatgatcctcttgcccatttgtcttga

SEQ ID NO: 2 - DNA, 2477 bp, Homo sapiens
tggcacagacatggcccttaaagccaaaaaccatgatggagtgaaggacagctgtgctcagacctgcgtcctgtcctctggaggctgctgtggttctggggatgagtcggaggtgggcaggcagcggtctccggggcctgcagcagggaggccaccacctgcacagcagaacacagcaccattccacagggagcatcccggggcgggcagcaactctggaggcacccccgggaaggagccaggcatgggggaggcggaggcgaccccagaagcagaggagccgctggggagccacggccttctgggtgtggagctgtggaggatgagtgccacccctcccttccgggccttctactctgtagggatccctacgtccaggaccatttgattgtcaaggtctcggcaccctcgtcaggtcagctgggggccaaggcccctaactccgaggactggggccgccaacatgggcagcagcacaggaggccgagaggaggtccacaagggctgcacttccttcctggctgcagtccaccccccagagcagggcgggcgtggagccactctcaccagtattgttggccttgagggcctggtgggcagtgccgcctggtgtgggggacagctcctgagcaggctgccgcattcctggcactctggtctccctgggattctcaggtggcccacgctcggcagtgctcgccttctgggctctcagggctcgtttctgttgcagctcctgcagtgggagcatcgctgagcactgtccctgggagaggacgaccccaggctccacagccaagctgccctgaggctaagtgtcccggggcccagggagccccagcagcagccccgcacggtcaggcctgggccacggtgctgctcagtggtccctgcgcggtcagcacctgaatggctgctcgcctggcttggcgtgccttctcctcccgggccttcctcctggctgcctctttctgctggtgcaggtccaagagggtcccctcgcctgaccgctgccgctgctcctgccaaagaagccggtgccatgtggcgtttacatctggaagacggaatccagacccagaccagaggtttccccacaacgccctggagtcccctagagttcgtggaatctcagggccagcagggaaagtgaaaccccaccaggaccttgaacctgccatttctctgctctacagaggatgagccctacgtcgcaggtggccaacagttctggcgtgggggagacagctctgcccccacagaacgtcctcctgagactctccagcctgggatggacccagcaggcgtttcctgacacccaggccctgaggaccgccagtgaggaccaccctgactgtccgcggggacccagggtcaagaaggatgctgcacccagagacggggcccacgagcaatcctaggctttgattccacctgtcccagaaactcaaacccctgggattctgggccagaccccccgggggagcatggagtgactgagacgcccacactgacctcccgcttggcctgaagcaagtgctccaggcgggcagctcctgctccgcgccgctgcacctggtgccggtaccagcgctggatggtgacagtggcctggttcacctggtggataaacctgcccggagagcaggactcagggccaagacaggaccagcgccccggcaggacccagctggctgctggtggaaggtcgagccggggaagagagaagccggcggctgcactcaagtagcccttttcacaaggcaggaccagcccacctggaccattttcacatggcaggaccagccgcctggaccagctccactaaaacccaaaaccttcttcctgggaaggtgcccaggggagaggaaacgcctacccacgcaggcctgtgtggccttatttacaattgccaggaagtgggaagagttcaaatgcccatgacctggctacagcgtgaatactggatggcgggaccctacccacaggcaacaggcccgggactcaggccagtgcagaccacaggccgtggctccacagagagggtggtcggaacaggcagggctatgagggaacagactggtggctgctggcatctgggcggggaaggagctcgagggaagcctggtggtgctgggccgtttccttatcttggtctgctgtgtccacagacagcactatacaccctggtggaatctcatggaactgcacacttacaatgggcaccttctattgtatacaaattatactaagtaaaactgattaagcaaaaaaaaaaatgcttcaccttggctctcgggaccatgtgtggattctctcagcaaaggcactaacagagaacccagaacgtgtgagccctagctcgggagcagtctgccccgggcagaactggggggcttcaaggggttgcgggcttctggtcccccttccctcgtgccacccaccgcgtctacaggcctggtctccctagccctaac

SEQ ID NO: 3 - DNA, 3685 bp, Homo sapiens
caagcctccttccccggcgcacaggcacgcagccacaggccaagctgcgacgcgagctccgcgcgcgggatctccgcaaaaggtccgcccgatgcgttgggcgggaatcgagcccgggtcaactgcttggaaggcaactatgctcaccactataccaccaacgccgcacggcgcgggcagccccgccgcgccggcccggggctcccaccagcgcgccgccgacgcccggggcaggccggccccgacgcccggtccgtccgcccgcccgcagctccgcgctgccgcggcctctccaaaggccgccccgcgccccaccggtgcaaggccagcgcggctgacccgttacgcccgcctgcctctgggggcgctctcgctcactcgccgcctcgggcccccagagcccttccccaacaggtgcccgggggggaaacggccggcgccggcagggtccccactcctacgcttcccaccgggcgcagggccccgtgtgtcgcagaaagcctcttccgacaaccactttgagccggcagctcgttgggcgccgtgcagggccagaggaggcctcccggctgccgctaccaagccgcggacgagaagaaaagacaggaggccaaggaggcccagaaggccaaagggccaggcaggccaggcccgagatggcaccctgcgactagctggagggcggaggaaggagaaggagggcccacaggctgggtccgaggcggcggcccaaaaagcacggctgcctccccgtcggggaatcgaaccccggtctcccgcgtgacaggcggggatactcaccactatactaacgaggacgacggcgacggtcgccgggacgccagaccccactccgaccgcggacgcctagccctgccttgatcccctcccccgacggcaggggccgggcgcgtgctcgccttccacccgccgcccgccgcccgccacccgccacacgccacccgtcacctgccacccgccccccgccaccgttggcacgacctaccccgacacccaacaaagcaccctgcgatcccgctgggacccggagccggagccggaccccgacaggtaccggagcggcgtggaacctccccgcgcgccctgcctgctgtctccaacgcggggatcgcgccggggcaggaggaggcgcgggcgaaacagtcaggccgctgctcctaggacgcggtgggcgcacgccctgcggggttcggcgagcggaggcgcgggggctggggcgtgcgccggcggcggccggcccgacgcggaccctttgggtccggggtggggacgcgggggcgtccacgccaacgccagccggctccgttcacttggcgcccgctccccccgcgcggtccgtcggttgcgcaccgaacccagacaggcgccggccaagggcgcaggcgttcgcgccgggtcccagccatgccagcggcgaagcgccccggcgcgccgtcaggatggccgagcggtctaaggcgctgcgttcaggtcgcagtctcccctggaggcgtgggttcgaatcccactcctgacaagccgaccttttggcccgcccgccggagggcaacgcccatggcaaccctggagcacctttggccgcttcctgccttgagcccttgcccgctctccagactccagcccccttgaagcaagcctccaaaacgccgccgcttctcaggcacgtccgttcttcctgcccacccgccggctgtcgcagaaacagcccaggaccatgcgccagcgcccgcgaccctctaccaattgcccttcggacagacgccctccccaccacctcacacgccctcttccctggccccacacacagcgagcgaccgcgaccaccttccacgctcttccctgcctatctcctccgcccgccttctcctcactcgcccaaacagacacagcccagattcttcccctattcctccttttccctccttcctcccaccggcctccgcccaccgcccaccgccttgaatcgccgctgcgctgcccagaggcgtcctggcctgaacagcccgcccggtttcaccctccaacttctgaccgctgagcagcagcgagcgactcgctcgtggagccgcacacacgtctcccaccagaggcacgccatccaacatcctgtcctttcctccgacccctcggaccccggccgcgcattccattctgccgacaccctagccaggtcgccgatcccacctcgctacctgtgctcccttcccgctaacacctgcctgccggcccacctgcagcccggacgcctgccggccagaggcagcgggaaccctgcacacagccgggcaggcgagtccaaacccggaaagacagcccaagaggaatcacgagcggaagccctagatccccgtcacccgcccacaaacgcctggccccgccgggaccagctctgcgccacagcgcatccccacgcgggaagccgcggcctgggccgtcccagccacacccagcgcgccttctccagggtcagccagctgcggctctgccgaagcgctcctccgctcctttctcgcgctccagcctccctaccagcccagggggccggaccccaagtgcgagccggtggcgtgggtcagagcgcaggagcgaggcgcccacggacctggtctgcgtttctgagccgcacgccacggctgcgagacccgttccccatcgccgcccccgctcgctgacacacccatcccgcctctcacctgctggtgacacaagtgagaaggctggccccacggtggtgaaaaaaaaaaacaccacacgaaagaaagaaagaaagaaagaaagaaagaaagaaagaaagaaagaaagaaagaaagacagaaagaaacaacaaaaacaaaacacaaaaactctgggtctgtgccggggatccgcgctcagcaaggcccgccacagcaaatctgcccacacgggcattcgggcgcgggccacggccggtccttcccctggagaccccggcgggcagtctctcgaccctgggcggcagagaaagcgcaagatgggacgagtcggcctctctccctccgctctccctccgcgccccgcctcaggtccctcgacgtgacgagagcctccccttctgctcgccccatcgggccagcctctcgtggacgctgcaataggacggaggcccacggcaggcggtgaccagtgaacggcggctggtggcgagttccgctgtgccagcttccgttggcgtttgccatcggtgcatgggtggttcagtggtagaattctcgcctgccacgcgggaggcccgggttcgattcccggcccatgcagcacgccctcccattttggtgctgcagcagcaccaaggcgtagctgcgctcgcctctgccgcctccttacactcggggcgcgcgagcgagtccggcaccggctgcgctcccacgcgcgacggccctctgccctttcttccgtgcctctctcgactgacttagggatgagcctaccccccgcacccacacaccttggtgacaacaacccctccagacacgagagcgcgccagacaccagaacttggcagcctcctggtcctgtttctcttcattgccctgccaccgcctctgcccgacgcatttcacttcacggaacaccgccaggcaccacgggcttgcagccactcgcaccaccccttctcttcacatttcaccgcctcgcctctctc

SEQ ID NO: 4 - DNA, 2407 bp, Homo sapiens
taaggtctgggtattctcaggcagcagggacaaggtgggcttttttcctggttgctaaacccacgtcaaagtcgagctcagggactggagctcaagaaacccaccgcccattctccagtccgaccggggacctgcatgcacctctgccgtgctgccctgagtcctccaatcctccacactcttcctctgttatgtacacgtctccacccaggcctgcaaaagtcccagcttcctccaggggcagggacccgcacgccggcccagggcttggcacgcggggatgctgaaacagggccaggcctggtttccagccgatcgtcagagtcccaaggcccagcaaccttcctcacaaaggcctcgttaagaggcgaggaaacaagagccgggagaggggcgcggaacggcgggcgggacgaacgaccagctccgcgcctccggccagctgcgtcgagccaggggcaccgcggctgttgtgcggctggaaatctaggaatgggaaggttcggggcctgctcggctccggaggcagctggcgggtcgtccctggcggcgttggagcggtcagtggcagccgggcacgggcgaccgggtcgcccgggtcgccctcagaccgtgactcccgaaaaaccttgcgggcggggcgcgcccgcgccgtctcttgccggaaggtgcgagttagtgcgctcgattgtgggcgggggcggaaagaggcgcgttttaaagtggtaacagatggttttcttatccaataggattaaaaaatttgtccttacccggccgaccgcggaagtagagtaggcgggcggccaatggggacatgatggggggcggagccgaggcctccgaagcggaagtgggttgctgttgaggcggcggcatctttctcgaggagctctcctgggcggctgaagaaggagcttcttctccggagtgcgccggcggtggcgcctgcggacctaactagctccaggttaggccgagctttgcgggaaagcagcggtaagtcagggccttgcagatgcgaggtttaggcagcttcgcggcctacagaggcctcggcccgcgcctcttgggggagccgcgctgcgcggcttgacccagccgaggctttgcagcccgggacctcgagccagctctggtcgctcgcactgccgtccgcgcgggcgcaccgagcccggcttggcgcgggcaacagaagttaggaggtctgcgtctgggtctcggctcaccctggggggccgcggccatggggcttagttcctagcctaggaagggaaactgagactctgggaggggcaggaacgcccccaaggtcacttggaaagtcgggcaggatgtgctgttagggggaagacccgggcagggtttttgttccccgctgacgacgcctcctttgtgtgttcgcgccgccgccccgccatcgtggggcctgcgagtttgccggggtgcgtgggccgcgtggcggggccttttgtaggtcgggaggatctgagtacgggtgcgggcctgaccgtgggggcgccgaggtcgcagtctaaaacttagtagggcctcgatttccgggcgcgcttccgggccccggctggtggttggtggaacgtgcgactgtgaggcttgcggcccagccctgcaccgctcgggcccttcaccgctctggcgcgcctatagacaggtgtatgaagattctcacgacccgaaacagagttgctagtaaacaccgcttttccgcctttgatccatcggggaagagggaaaaggatagagcttgggcaagccgttttggtagggatttcagcttttgtctttcacttgtcagttcccatagacgttcacaaacttaataatcttcgttctgtttctgcaccaagttcttgagccagacgtagggtctcagctctggagcctggcttagactgtccaactgactggggagactgaggtccagaaaagtgaagtggtctgcccaaggtcacatagccagctatttggcagcagatgaggttaagtcctacctgcaagatttgggttttgaattcattgaccaggagttttgggaccactgtcaataaaagagacattgaagggaatcttttgttactttcttggtgatttgctttttaatggacaaggacatattgggttcagttttatctgtgagtttgaggtgaaatagaggcattcgagtagcaagatatattgctggcttttgtattgcctgaatttgagcttccaaaaatcttactttaacacatcgtttattgatcttttcttgaattactacctttgtaaggaccttttgtaaacattgtttttctaatcttcatgaaatcttaatgccatacgtaaactatttctttttatataatgtatgcacatctgtgctttgtacataaaatgagtaagattt

SEQ ID NO: 5 - DNA, 2229 bp, Homo sapiens
tctttcctcggcgctggctggtgcgggttggggtcaggtggagaagccgctctttgttaaggtgacagaacgtgctgggggtgggggccggggccagggccggtgcaactagggggccgctgccctttcctggacacagtggaagcttcttccgcatcaccaaatttttgtcatcctttctgagggacctgcttccaggcagcacgcaagttgttgtcccgggtttactccgcacccctctactgggtgaggaaggagcatcttgaatggagatgggggtgtccccggtttatacatctgcagagaagaggtgtgccgggctgcacctctggaggccgcggtaactgatattagagaagaccccggttgcagctgggaaggctcactggctggaaagaggtgcctcctccttccagcaaagggccctgtttggaagggctgcttctcacctgtctagtggcaccacaggacggtcggcttccactcgaattcccccggacggtatcatcacatagccgggtcctcgcagtgttggtttcccaatccgatgactgtcacctcggtgaggacctgtgctgatggccggagaaccctgcgctgcgggcgcacatggccaggtggcgcctggcaggcgacgtccgggtgcaggacggcgctcttaccgccccaccccaaaccgttgcctgggcctaggtccttcggcttcctgaacaggggtttggggggctaaggacgctgaggctccgggggcaggaagttctctctggttaagcgttctctcttctctccggcatacactcccctacccacccacctcgcctaccctcggggcgagaggctcaccaaggcagggcgcgccccccccatgaatcatcccaaggcctctgagccgcgggggctccgggcaactatccccctcctctcctggcctcaggcaccccagtccaggggtctgcagagaagcccgaagcccggacaaacgcgccggacgtcaacaacctctcatccctggcagcagcaaaggccaatatatttccatttcttatttcagtttgccaccaaaacaaagctgcgcgcggctgagggcaggaaggcgctgagaccgagaagaagggacgtcccggagaaagtgcgcccagctgatcttagaaaccagagtcctccgggacttcgccgagattttctgtagggcgttttaatctgttttcctactgcgtgccggcgtcgcagcgcgtgcggctcagggcttggtgactccggcttagcccggcggtcgcggcgaggttcctggcgcagccgcttggaacttcgcattagaatcgggaccgcgcaaatgccctggctgaagtgtcaccctattcaagaaacactgctgtcaggaacaaaatggggtccccggtgctccgaagtatcttctgaaattttcttaaaacaacttacaaaaaatgtttttgctttaacgttttacaacgtttaaggaaacatgtaaatggtctgtttctttatcgagatggtcgtcctaactaacagtgtacacatacataacaattcttccaactttcctcctcagagctaagcacttcactatatgtaaattataataaagaaaagattgtgcaagatcatgcaagtcgattgacttaaaatattgagttttaatccaggccctctgtttttctatttaacaacttttgtgtttggaccagactggtgaagcaggctatggaaattaacaaagtaaaaaattaaaagcatcttccttcgccatccctccctccaaaattaaacaacagtcgccccttcctgagcaggcttcagtcccaggctcgagttttcctgcgatcaccccacagtcacccacagcagctgttgctgcttctgtcgggttttcgtttctgccttctttgggtcgtctcttgtatacaaaacacaccccagttctctaactaaattcaaatacgaccccggcagaatttacacatttcgtggtgcatggattgtgtcggtgcaggggaaataaataccctctggtatttaaccactgagtctaattcgaaaaatcgggactgggcccctaggcggcaccccaggggctccaacctggcccgcgcctccccagaccttggcgctgagagcgctgcttttgcgggtgggtggacggagaggtaacaatctgctttcaacaaaaacctgtcgccaccgaatcgaaagcgaaagggaagggagaag

SEQ ID NO: 6 - DNA, 6887 bp, Homo sapiens
cgccgcccgtgggccgccggccggccgcagctcgctggcgacgagggcactacagttgctctgaccgcgtagattatgcatgtcccggcctcgggaatttaccatgcattagaatacattagcgcctgcattttaaaaggctaaactattggctcccagctagggactctcggtaagtggcttgttagtgacgagtgtttgtctatactggcacatagcggagtcttttgctcccggcttactcgcctccaggaaagctttggggtgaggcgaaggcgattgaagcaatgccccttcccccagatcgcagctgctcaggggggacacagcacggcatctttcaccgaatctctctcgctcgctcgcactccagcctccctctccccagcgacccccccaccttctcctccctccctctccttgacgtttgattccagtagcaaaggaggtaaaaaaggcaccgagccgtcagccaaacctgaaaagtgcggccccgccccctccacagccactggtagcttcccgtggaaggcccgcctcccggggcagctgcggcctcggagtggttgcgcttggcgcccgtcgggcgtggccccgccccaggtccgggagggtaggttggctgccccggcgagcggcagagcccttctggacagctcccgctcacccaaacagaagacgtcggcgccggagcgggctcggacatggcgaggctgcgagccggcccgagcggcggggcccggtgatccctccctccctccccgtcccctcccctctcccgcacgcacgccccgtccgcccccaccccgcccccaccccgggcgagcccgcccgcagcccggggcgcacacccgcacgcgcactcctctccactcactcccgcgcccgcccccactcccgcagccgagccccgccacgcgcgccttgcccgcccgccggccgcccccgccgcccccgccgcccccgggccctgatggactgaatgaaggctgcctacaccgcctatcgatgcctcaccaaagacctagaaggctgcgccatgaacccggagctgacaatggaaagtctgggcactttgcacgggccggccggcggcggcagtggcgggggcggcggcgggggcggcgggggcggcggcgggggcccgggccatgagcaggagctgctggccagccccagcccccaccacgcgggccgcggcgccgctggctcgctgcggggccctccgccgcctccaaccgcgcaccaggagctgggcacggcggcagcggcggcagcggcggcgtcgcgctcggccatggtcaccagcatggcctcgatcctggacggcggcgactaccggcccgagctctccatcccgctgcaccacgccatgagcatgtcctgcgactcgtctccgcctggcatgggcatgagcaacacctacaccacgctgacaccgctccagccgctgccacccatctccaccgtgtctgacaagttccaccaccctcacccgcaccaccatccgcaccaccaccaccaccaccaccaccagcgcctgtccggcaacgtcagcggcagcttcaccctcatgcgcgacgagcgcgggctcccggccatgaacaacctctacagtccctacaaggagatgcccggcatgagccagagcctgtccccgctggccgccacgccgctgggcaacgggctaggcggcctccacaacgcgcagcagagtctgcccaactacggtccgccgggccacgacaaaatgctcagccccaacttcgacgcgcaccacactgccatgctgacccgcggtgagcaacacctgtcccgcggcctgggcaccccacctgcggccatgatgtcgcacctgaacggcctgcaccacccgggccacactcagtctcacgggccggtgctggcacccagtcgcgagcggccaccctcgtcctcatcgggctcgcaggtggccacgtcgggccagctggaagaaatcaacaccaaagaggtggcccagcgcatcacagcggagctgaagcgctacagtatcccccaggcgatctttgcgcagagggtgctgtgccggtctcaggggactctctccgacctgctccggaatccaaaaccgtggagtaaactcaaatctggcagggagaccttccgcaggatgtggaagtggcttcaggagcccgagttccagcgcatgtccgccttacgcctggcaggtaaggccggggctagccaggggccaggctgctgggaagagggctccgggtccggtgcttgtggcccaagtctgcgcgccgagtcacttctcttgattctttccttctctttcctatacacgtcctctttcttctcgtttttatttcttcttccattttctctttctcttccgctcttcccctactttcccttctcccttttctttttctttcttactctctccttgtccctgagctttcattgaccgacccccccccatttcattcgccctcccctcaatgtgccaacctttgccctatttccgatcttcccaggtactgggaggcgggatgggggtgtgcgttttcctctaggagccctgtctttccaagacccacagaaaccaggacctgcccttattcaaaaccccatgcacttcaagtctcttttagacaacacatttcaattttccgggctgactagtctccctgtgcagaggcagttgagaggctttgctctgcagagggaaaagagctctctactctcccacccaccatataggcaaacttatttggtcattggctgaaggcacagccttgcccccgcggggaaccggcggccaggatacaacagcgctcctggagcccatctctggccttggcgttggcgcagggactttctgaccgggcttgaggggctcgggccagctccaatgtcactacctacagcgagggcagggtgtaaggttgagaaggtcacattcaccgctttgggaggacgtgggagaagagactgaggtggaaagcgctttgccttgctcaccggccgtccttgccccggtcccagcgtttgctgggatttgccaggatttgccggggctccgggagaccctgagcactcgcaggaagaggtgctgagaaattaaaaattcaggttagttaatgcatccctgccgccggctgcaggctccgcctttgcattaagcgggcgctgattgtgcgcgcctggcgaccgcggggaggactggcggcccgcgggaggggacgggtagaggcgcgggttacattgttctggagccggctcggctctttgtgcctcctctagcggccaagctgcgaggtacagccctctattgttctaggagcacagaaacctcctgtgtgggcggcgggtgcgcgagctagagggaaagatgcagtagttactgcgactggcacgcagttgcgcgcttttgtgcgcacggaccccgcgcggtgtgcgtggcgactgcgctgcccctaggagcaagccacgggcccagaggggcaaaatgtccaggtcccccgctgggaaggacacactataccctatggcaagccagggtgggcgacttcccatggatcgggtggaggggggtatctttcaggatcggcgggcggtctaggggaacaattcgtggtggcgatgatttgcatagcgcgggtcttgggatgcgcgcggttccgagccagcctcgcacagctcgcttccggagctgcgagctcaggtttccacccccgatcccccgggctttcctcgcaccgctgagcccagcttgtggggtgcactcgaccaacgcccgacagggctggggaatgtgacaggcagcaggttcacccgggcttggggagggggagtttccgctttgacagcattttcctttgccgtctgctggtggattcctattcccagtcggtaatcgccccgcagtgttgatctaagaaggtaaagaaaactaggtttccctgcaaagagcctcccccaaatcggcggactccggatactttgagtggatttagaaatttatgtaatctttctcctttagtttatttttcatcctctcctacagttttctctgatttgctgttggttcggggcaagataaagcagccagtagagagcgataataatagcggcgggaaatgaactggagactggctgacagttcttaacattttgtcatagatccccccgaatgtcccaggctgtctctggtgggttttagtacccgccggcttcttgggcaccggggaccagaaggaacttggcagctggtcttaggggtacagttaaaggcaggatgacagctattctcctgctcatctcagagcgctgccgccccctcatgccggtcgcgcaaagaacacagcttttaaaaaacacgtgccttctgcccatataggtctgaaagtgatgaggaaagtaatgcttcgcctattagcgagtttcagcttttaaaatgatcccaagcgttgctgagatgagaaagcgtggcatcccgggggtcctcagccccacccgcgcccatggtgcaagtctgcagggacaggcccgggacagcactgcccacgctgctagattttccgcagaggatcgctgaagctgccttcgtgggagacagaatgcctcctccagcgagtggaaaaggcctgctgaggaccccgctttgctcgagcattcaaatgtgtgtctgttttattaccctgggttgaaaagggacaagagctttagcctttttatctggccattttatcagcaactacaagtgtgttgagtggttattattacataggaggcttttcagtttggggtcagtagatcagtctcttcagacactgatgcagaagctgggactggtaagtaggtattatgtgctcggagcgctaggggacaggagcaaatggagaagaaaagcggaggctttctccgcccggagtatcgatcggaatccccgccggtacgccgcagagggccctcgccgttgggccccgggggtttaacaagcccagccgctccgcaggcggctcggccggactctcagaccggtgcctggaagacaccgtccctgcccccctcccgccaaacctgcctcttctctttctctcataggttataggttccctttctctctcattttggccccgcccccgggtcctgccaaacagccaagcaggccggggtttagggggctcagaatgaagaggtctgatttggccagcgccggcaaagctcacccttaggcgaggtcacaacagaggcaggtccttcctgcccagcctgccggtgtagtcacagccaagggtggcacttgaaaggaaaagggagaaaacttcggagaaatttagattgccccaacgttagatttcagagaaattgactccaaatgcacggattcgttcggaaagggcggctaagtggcaggtggttgcaaccccgcccggtcgggccttcgcagaggttccccaagaccagcccttgcagggcggttttcagcaacctgacaagaggcggccaagacaaatttctgcgggttcgagcacacactctcgggcgttgggccccagagacctctaaaccaagcacaaacaagaagggagtgagagaacccaggctagaacttgcacgggcatcccactgaggaaaagcgaggcctcggtggcaggcatgttttcttccgacgcccgaaaatcgagccgagcgcccgactacatttactgcagaggtttccgcctccagtgagcccggatcccccagcggcctgcccggagctggtctccagtccccgccgtagtccgacgcacggccctctcctggcagcaagctcccagcggccagtctgaagccaattctgttcaggcggccgagggcccttagccaacccaccatgatgtcgcctgggccacctgatgcccgcagcggcgggacacggcccgggcagtgcgcagtggctcctgctaggggcaccgcgtgcgtgcttgtctcccgctgcgccggggacgtccttgggtgacacgggccgctgggcacctcccaagccgaggaaacggacccccttcgcagagtctcgcgcccaccccccaacctcccacctcgtttctcgctgctagggctcccgactcagcccacctctcctggcggtttagttagggatcagagctggagaggctgaacgcaacccgtgccagtacggaacagacgatatgtttgcctgctagctgcttggatgaataattgaaaagttcgctgcagtctgtgcttcgtcaagtcccgggtgccgggagaacaccttcccaacacgcatcagggtgggcgggagcgggcagaggaggcgggacccgagggaggagagtgaacccgagcaggagaagcagcccaggcagccaggcgccctcgatgcgagaggctgggcatttatttttattccaggctttccactgtgtggttatgtcactttctcaaacaaatgtgtatatggagggagatcgatgctgataatgtttagaagattaaaagagcattaatgctggcaacaataacgtaaacgtgtggacccagatttcattgatctggaacttgatccggcgcgtttccagtaagcccgacggcgcgctcttcccagcagagcgctcaccagcgccacggccccgcggttttccagcggtgccgcttcgccagctctgcgcgggttctcccgtctgaccgcagctcctcccccgcgaggccccagcccgccttacttccccgaggttttctcctcctctcgcggggctctctgccctctgcaccccctcccccgacctctgcaccacccgcccctgtgcgcacacaccgctacttgcgcttccggcgatccgcctgggcggctgggtccgcgaagccaatgcgctgaacggtgcccg

SEQ ID NO: 7 - DNA, 3952 bp, Homo sapiens
ggccgcagccggagaggaacaggaaccgcagtggggacgccctggtccccgggcccacagcatccgggacggacgcgcagtagcgcgggccgggaactgggtaccagggcgggatgggtgagaggctctaagggacaaggcagggagaagcgcagcggggtgcggggaaccgcacgccctccctttgcctctgcttcccaccccgaggcggcagggcgggcgggcgcggttccgggggtgggcgggctgggcggggcggaggcggggccgcagcactggcttcacccagcctctcccgcccgcagccagagcgagccgagccgcggccagctccggcgggcagggggggcgctggagcgcagcgcagcgcagccccatcagtccgcaaagcggaccgagctggaagtcgagcgctgccgcgggaggcgggcgatgggggcaggtgccaccggccgcgccatggacgggccgcgcctgctgctgttgctgcttctgggggtgagtgttagccggagggggcccgctccctttcccgggatcagaactccgagaagagccgggcgccgccaccaaggaaacagaacagagcattggggtcccagatactgagggtgggtggtgggaaaggacctctgatgccgggaccacgaaggagggtctagggttcccggagcgcagaggcgactctccagggtggagatgagggcaagaccggagcacggatgccggtcctcaggtaccgcagggggcggtgggggagctgggaggggtctttcaagagggggcatggggctctccgatgcccaggttcttcggaagaggacactcgaatgccgggatcccgaagggactttcccctcagcatctcggtctctggagagtcgtgggacagaaccaaggcgagagaaggagggggaactggacggggactagagatgagaggggcgagctgggctggggcggggagcccgggacgacgggatggaacaatggaggaggtcggagggactggaggcagaggggacccggcaaggacaatggggaccggccagacaatgggggggaggggcgtcggagggagaggttggggagcgggagagaggttgagaagtgggttagggagggcagaagaggggcgacggcgagggcggcagagagatggaagcagaaggaaaggagacagagcggggcgcggaccctgaagtggtcggggtcccgcctgcccgctgagggacagtgagacgagaagagagagcagaggcttggacatttccagcgcctgtccccgcgctcctgctcgcggcctctcccagtcccggaattggggctgcggatctaaggctgggaggggagtgcccacttcgccggggcgaacccgctcccggggttcccccacggccggcgggctcctccgacgcgcgtgttctcacggcttgaagcagcgcagcggatcgcgagggacggagcgggtgtgcccctacccgggctggcggtggctacgtctcggggtgcagagcgccggggcgcactaggcggggacccttcctggccgcgcgcagctctggctacgcaggcgggaggcggcaggcagggggcgctgcggggcgaggcaagtgcagtccgccgctgcctgcctgcgagtctggggctgcgcgccgctccccacctagctgcgcgacccgagcgccgcgcccaccgcgctccgtgggctcccgcgcctcgaagggtcgggatccggtctgagcctctcctggctctcggtgcaagccgctgggcacctaacgagacgggggcgcccggacgcctcggattctgtagcgcggtatcccgggccaccgactcggcaaaggtcggcgggtcctccgggtggtccgacgagattgtcagatgtggcctgctttatggccatgaaccgaatgccctggaaggtctggcaacggaggaggcgtcttcactctccccgccagcatctttcatcagagcactgcgccccaaattccggctttacagatacggagactgaggctctgagagtttaaacgacttggccaagatctcacagcaagttgggccagagtcgtggctagactccccgacctgattcccagctcggtactcccccaccttttcagggggcagccgctgtcccagctcggggtcacggctgcgtttcccagcagggcggggggggttgacactgtccccagagtccgtcggcggtagagcctgcgggtgaggtgggcagagattctgtccgggtgcgggccccagcccgaaagctcagccccagttccctggagctgtcaggacctgtggctgcgtccggggatttgggagcgaccgcgggcacgtctgctgactaacgccgctggttagagacgctgctcagacgcgggtgggcgagcgtagaccaggagagcggggaggagggaccggatcccagaggggcaacgacttgggctccgggtctgggcaagagcgagggtccccgcgcgaagacccaaggaaggaggggagctgggcgtggaggacctgggcgcttgggaaggtgtaccccgacaggaacctgccgtctgcagcccctgcggctcccgcctccgcctcggcgcgcggctgctcggtctgggatggctgtgcgcggtccgagtttcttcctgggccgcggtgagagagagagggctgaaaccagagcgcgtcccggcgggtcggctggcgggccgcgccggtaatggaggcactttgtcattcagacgtctgtaaccagagccgccgggctggctaatgcgcctaatagggatggaacgagggcagcaaatgggcgtgcgtgagcggccgggctgagctgggtggatggtggatggggaggcagctccgcgggggacgggcccctaccgcactgttccagcccagtctggctcaagcgcctcgcttcttccctgggggaccgcgtggggaggcgggaataatcgatgtgctgagttcctactaagtgccttgcacttccctggtagtttctcttgaattatttaatccttataaggtcctagcaaggtgaatttagttattcccacttcgcagttgaggaaacagaaccttctagactttcaggcccgagaccaggctcccccagtgagtcagtggtggcgtctttgttggaacccaggatgcttggcctgggatgttctctttcctacatatgccaggctccctcccgccccctaccttctagatcatggaaggagtcgtggctctgagagattaaatcgtgccctatgcctttggccccacacatttagatctgagccccttctccacacgcagaggccctgccccctctcaagtctctatgctacattatcttgggtaattagctcctttcctcccaactcctcccctatccaaagggagtgaggggtatgtgccagtgcctcccctgggtttgcatcgacctcaaaaggccctccaggtgtttgaaaatctctcccatcccatggcggtgaccacggccccattcacttaagagctctttgctgaagctgttggaatggccagggctgattatactgaaacattcgtatggtttcaaatactttcaactgtttcgctgtttctctcttttctctaattaaaaaaaatgaaaattcttaaaagtcaattcatctaaggatccttccaccttagttccttgtaagccttgaaatggccaaaacaaaaagattacaagcgttcttaaaaatgagatgaaatcattctgtcaaatgtgaaatgactaagtgtaacacatacaaatttcagggaaatttatctgtcatccctataaattaatccttttggatctgattttggagcaattagcctgaatgttagtcacccctccctacttggctaaactctcccctcctgcctggggtctccttaagatgagatgcttctttgataactaacatttatt

SEQ ID NO: 8 - DNA, 2820 bp, Homo sapiens
cctaggggacaatacccaggcatgttaacggagtttaaaatgccaaggaaattacaccacaattctgcccagtatactacaggctgtcaaaccgaaatgctatgccagctaggagtgcagcaactcccatcctctggccctatttaattaggaagcttcagcagagcgaagcctgccaagcgttcgccgtcagaatctgaaggaacccgagcgagcaagaagagtgcctgacccactccacagaagcctgtccagaaatggaggagtcagcgcccactgaagtcggttccgccctcggctcgcctacatggagcctgaccagcctcagtcatgcccactccggcctgggagacccgcaaagtgttctttttctcaactcccctgtactaccttgaagcttagggaagcaaagagaggggcatatctggactgcaaaaccaatgtcttttgccgcctaggagagaagggaatgagagagagagagagatagatagatagagagagagagagagagagagagagagagagagagagagagagagaaattctattgaaacccagctcctctagaatctgtgtgacctggtcttcaacgggagaccagtgcgacctcatggcacctttgccaggaatcagcgattcccctgcagtcaccatttgatttattgctttctcgctcattctttctcataaagttatttcttcctcatcctagtaagacttttttctttaatgatgacaaagcttctgtttcagtgtttcccctaggattggtgctctttcaaaacagtgaacccagaaaaccatcccgtttaatatttctcaaaatcctcgcagctccaatgtaagcgcaagcatgcaaaggtttcctgctacacctgcactttctgcccatcccagaaccacccctcacccccgggcctgcaacagttccccttgtttctctggatagaggtgggtggtattaggggtctagggcagtaggaggtgaggggctgaggaggccgctagggtaggctggtctgtgctggatacgcgtgttcttctgcggagttaaagggtcggggacgggggttctggacttaccagagcaattccagccggtgggcgtttggcagtcacttaaggaggtagggaaagcagcgagcttcaccgggcgggctacgatgagtagcatgacgggcagcagcagcagccagcaaaagccctcgcaaagtgtccagctgctgcactgccgcggggactcccacagcaccatgactagttcgtgcaactctgcagcagcaaacggcttccgaggaacacaggatcgcgggggccgggcagcgggctactgagcatcccgcggacggcggcagcagaggcggcggcggtggcagtggcacccggcggggaagcagcagccaaacccgcgcatgatctcgagagtttcagcaacatccagggactgggctcagccccggagcgagagggtcgtccgctgagaagctgcgccggagacgcgggaagctgctgccataaggagggagctctgggaagccggaggacaggaggagacgggagtccaggggcagacgagtggagcccgaggaggcagggtggagggagagtcaaggcgccccgcagcccggcagccgcctctcgagctctgccgcccgcatccctctggcgtttgggaagcagcaggtcctcagcccgcccggggtcacgtgggaagaggcagtcgggctctgattggtggagcaggatgcaggtcccgggagggaggggtcgacgaggaggtgcaaggatgcaaggaggaggcggccgcggaagccacagatgggctcgctcgccaggcgctggcccgagtggggctaggcggggatggctcaaatgagaagctcgggcttcagggtgggctacccgcacactcatataccattcgcctcactctccgctccaggacgccccctaccgaaggcggggtccggactagcgcccctcttccgcgcgtgaccccgggccgcgagtgcgggccgcggctgggtggcgtctctccgagctggagatggtgggggcggaggtgtcagaggagcagcagcagcagggcagagaggggcgagtcggcgcgggagagggcgtcctgctggcgaccggcgctccagcgtgcgggagcgcgccgcctaggctgtagggggatgcaggctgggaatgtcgcggcggagaggccagggacgtttctctagggatttacaggaaagagggtgagaggcgatggtgttagaaccgctcttgccgacctggaagcaacagcagcatctcccacaagagcgtgcaaccccaaggctgctcgccgaggcagctcagccatcccggcaggcgctctccttccttctctcttctcccctctctcctcccaggccccccgcagctccgacccagcccaagcgttcgcaggtttgaatccctctcctcatcacccgctcctctccagcccgtagcctattagtgtgtccacctgggaggtgcggtcagatgtgtttggaaggtcagattggtcgggacaagtggtctgagagaaagagaaaggctcctctgcatacgccgcgggtgggttgccgggagcatcggccgggcagcggcgtccgggaaggggagagcgggctccatttgttggcccaggcagtgaccctgcgttccttactcgggtctttgccggatggccggtgacctggggcgacgagagaaggtctaactcggcaggagtctctggctctgcgcgtttctttcattctctccagcgggaagggcaaacggcatagcgggacccgccttccg

SEQ ID NO: 9 - DNA, 2265 bp, Homo sapiens
cacccccacccagcgtgctcagggcacccgcaccgtgctagcttgtggcggctctcaaactaatcctgactgagtttttgaggcagccttctattcccactcgcaccaacccagcacgcttaccaaaattcccaagtaaccttctctttgttacgcaaacgccaggagctgcttgattctttcttctctccacccctatcccctttccagcctagccggcttcctggccgggcaagctgggaattcagcgactgaagggccttggaaggtgccggaggggagagacgctagttcgaacctccacagggctctcctactaaaaatccctaaaatgctggcccgagaaactctctttgttggagggtctgagtcctactcccttctgccgcgtgcgcccccactgccgtgaaccgctgtgacccccaatctaccaccccatctcgcgcccccagcgtcctagtcgccctgtatctgcccagccttccccctgtccatgtacctggctggttggtggcgcttgggacgcggttgtaggcgccgccgtactggtggtaggagctagcgtagctatagtcggcataagctttggctgggtagctcccggcggagccgttcacgccgtgatactgatactggtaggggttgagagctttgccataggaagccgaggtaggagagcagtagccgtgcggggctccccccgtagggctgtagtagtcagaatcggtagctgaagactcgggcaaagttggcgattcctgagacggatggtgcatagctgcggacgtctggaacggagcttggaagtcgccggatcggatgctggggacccttctgtcaaacactcctgtcatcgctcacgggcggcggcagcggctgtccttgctgttgtggcggcggcagctgccctagttggctgtggggctgctctggtctaagcagacatggctgtgggagcgagggaggaggaggaagaggaggaggagagaaggaggaggcggcggccgcggcgaggaggagactgggagtcgtgaagtctctgtctccggccggctgactgctggctgaggcgcagcacagccttggttaaatccttaattgcgcgcttacgcacagcggggtggatctggttctattggccagggcctcgggagcaacagtaacaccctaactcgtccaactagttttagcacaacaaagcattgcttaaaaagggggtggggggtactgagggggtgtgtgtgtttgtgtgtgtgcgcgcccgcgcgcttgtgtgtgtttttgcttgttgtggagtggggaggggtcttagtctatctgtttttagtaaattccaaagacatcgcagaagccacagcacaaggctctgtgatgtctggggacaatgtgttccaatcagaagcctcaaaagtgcacatgttttgggaatgaggtgggcgaccatctttccttgcttcccactaccccgcccccgtgggctgcaccaaaggcgagtgtagaattaaacactgatactgaaatagggagtcaaggtgcagggagtggggagcggggggatgtaggatggaggcaagaaggaagggaaacagcattttttttttttttagtggagtgttgggaagcaagttgtaacttacatgttttgaaaatttgctctttggggaaagaggcaacttcctttgcaggagatgagtatctcccggacgcgggctggacaggaatgcccaagaaggcacaatgtccattaagccggtgaatggcagggagagttcctgcagcccaaagtccttataatgacttttaaaaattactgtcttaaacacatataacttaaggaagcccaaatcctcgttgctggcttgcaaaaagagccaaacagctccacttctgtttaatattttcatctattttcaagacattggaataaaggctctttaactatgttcagtggccaaagactcccgcaaaggtgaatggatccatgtataacctgccatacctccaggaaagaatgggaaagtctcggaagtggggaaggagacaaggatcaaagcctttgcaaagtcagatgatgctcattgatttccccctcctggctccatgaatgtggcccagtctctccatttcccagacccgggtttctgtaccctctcccctttatttcctgctgcaaagacatcctacttagctcgtatgcaagggaagaaaggattcaagaatcattcagttgatacacgagatctaaactttgctcttcaggaggtg

SEQ ID NO: 10 - DNA, 5907 bp, Homo sapiens
gccgtcggagcagggccccagcgcaccgcgagcctctgcttcctccgccttgcagcgccgcgagcccttctttcctccgcgcctggccccgtctgcgcccctctcggcgtgggcattcgcagacccgctaggaggctgacgagaggtgtcctcatagagtcctgccttcttccagacccccaaacgaaaagaaagagaaaagccaacctttcgcctccattctgcacgcatttggagagcggctggtggcgagcgatccgcacaatcgcttccctcgcggcgtccctggacgggcggagagaacccgggtgactgagcctgaggctgagcttccttgggagcgatccatgccagccacttctaccttcaagggggactcgcggccgggtttacgcgcgaaggatgggtgccagggaaactgacttatagacgacccgctccgcgagagactgacaactcagtcctgcgggctttcggggcgcccagaccagtccttagccagaggatctggggctgcacagctcccggaccctggagggggtggtccgggggtgggagactgcgagcatcagcccacgccggccccctcccaccctgcggcggcgaggtgggaagggccaggatgcgagcttagcacctcccctagaaatgcagcacttcgcccccccacctcccctgccctcggcgctccctctttcacgcgctccctcccgcctccttcccaagggcgcccttcttctgcccccagctcacgtctgaatccctcggcgccccctttctcttctcctagccccttcctcacgtcccctgcctccgggtatttcctctctccaatcccccacccccgcaccgcctgattccgaggggcgggagcgcattgggctgcgcacgggtgggggcgccgcgccagcttcgcgtagctgctctgacgccgctgccgccgccgccgccgccgccgccctccgcagcccagctcgcgccccgcggcagctccgcagtgcactagccaccaccgccgccgccgccgctccgccagacctgctgccagcttgcccggtccagccctgagagagcctcgaacgccagctgcgagggtcatgagccagagagccccggggcgccgcgcggagagcaagcggagatagcgactttgcgccccccagccctcgccttcttgcatcgcgttccccgcatcctcgggtccttctgtcctttccgctgtccccaccgccgccatggccaccttgctccgcagcaagctgtccaacgtggccacgtccgtgtccaacaagtcccaggccaagatgagcggcatgttcgccaggatgggttttcaggcggccacggatgaggaggcggtgggcttcgcgcattgcgacgacctcgactttgagcaccgccagggcctgcagatggacatcctgaaagccgagggagagccctgcggggacgagggcgctgaagcgcccgtcgagggagacatccattatcagcgaggcagcggagctcctctgccgccctccggctccaaggaccaggtgggaggtggtggcgaattcgggggccacgacaagcccaaaatcacggcgtgggaggcaggctggaacgtgaccaacgccatccaggtaagcgcgggattcccagttctgcctgtcctcccccctcccagctcagcgtgccgggctctgcccccgacagtcgcccggtgatctcggcctggagaccccctcctgtacccaggaatctccctttctccatccctcccagccctgcgcggggacctacgcccccaggcggtgttttccgccctaacccacgctccctcccaacggcaccagctgcaagaccgctaggctgaagttcggtctgagacacctgtccggagacactgcaaaagtgaaggaaatggggggagggagcaggaagcgatgagaaagaaagaaaatcaggattggagggcacggtttggtcttggactctggaacggattcacagctgcatttttgggaggaaagaagaaggggaaatcgctgaggtcggagtctcctccccccgcacacacgcatagacacgcacacgtatataggcaggcacaccacatgcccacagccccccttcccacgaacaaaggcgcaggcacaggcgcacacgacatgtatctatatatagaccacagtactatccccaaatgcacctgcgtacacccctacagctccacaaacaaaagcatatacctgcacataccaaacacacgaatattcgtttgaacatatgcacacacacatgcacagatgcatgcagacaggaaccagcctgctcccttgggtgcggccctgttggagacatacaggtatacacacacgaaagcacacacatgctcccacacaaacacatttagtccgcaataatccagcattacctgtgcacagactcgcccctctcgcccgaaatcccggctgcaccgcaaagaggcggccagctcctccccgtgtgaccctggcgaagccctctccagaggctaagaatggcccctgctctctaggccctctccccttattcctaaccccccactccccaccaggcggcgcaggactcctacatagggagcaggtttggagtcttggcaacgacctccgagctagcaggggctggcaggccgcagctttctgggccgaaggagacttcagctctaggcaaccccggtcccttacagcttggccccgcggcgtccctggagcgcactatcactggggccacggaaggcaggttttctgggagcagaggcctcccaggggttgttccatgtatcggggtaagcaggactccaccgggccccgaacaccagatggcccgacccaaggcgctttccgctccggggcccggcgagacggccttgctggatcacggacccggggctgctcccgccttcgctgtgccccgcgacttcccggggcgtctttcaaggctccgtttgataggccccaagggaggccagggcaggaggctggaggctcgtaggcctccgggaccctggatttcgttagctcttagtccccgtgtggattctaaaccctacagccctgtccgcctgaccctgaagcttctggttctagactcttgctcggttcggctttctggcctccctggcgccttcccgccaagctcctcctcctgcttgcctccccagcctccacttagtccccttccttaggtctcgccctcgcctcactctaactccagccttgtcctaagactctcaatttccagccctgcttcctcctccccgcgcgctgctccccaagcgtcttcacattgtctctgttcttgcctcccaggggctttgccccaccttcagcccctctccctctctaccctatttccttttcgcctcacaactgcagcctttaacgtttcctcctctggtctgagcctgagacgcccgagttttcctctttagctcccgtgccccattccagccccaccacaaatcccgtgcccactctttccactggcccaggcccagctcactacctttcttagagcccctttccgactacgctcccttctgtcccttctcatctcctcccccaactcctcattctgttcctgtccccagaaaccatcccgaagtatctcccttccctcctgtggcttctccctattctcagccctctcccaccctagccctctcgctatcaccagccattagcgcacctttccttctcagatccgtccatacatccctccctctccatctctggctcgacacccgggctcactattagttcccctacatccaccccgcagcctgctcttaacctctcctccccggcggctcagacccaattctcagtgtccttagcgcccccttcgggccacagcgttaagccacgccccccgggcccctcatccgttgccaagttcgctgagcgtccgcgtctggttgcctctccgccccacagggcatgttcgtgctgggcctaccctacgccatcctgcacggcggctacctggggttgtttctcatcatcttcgccgccgttgtgtgctgctacaccggcaagatcctcatcgcgtgcctgtacgaggagaatgaagacggcgaggtggtgcgcgtgcgggactcgtacgtggccatagccaacgcctgctgcgccccgcgcttcccaacgctgggcggccgagtggtgaacgtagcgcagatcatcgagctggtgatgacgtgcatcctgtacgtggtggtgagtggcaacctcatgtacaacagcttcccggggctgcccgtgtcgcagaagtcctggtccattatcgccacggccgtgctgctgccttgcgccttccttaagaacctcaaggccgtgtccaagttcagtctgctgtgcactctggcccacttcgtcatcaatatcctggtcatagcctactgtctatcgcgggcgcgcgactgggcctgggagaaggtcaagttctacatcgacgtcaagaagttccccatctccattggcatcatcgtgttcagctacacgtctcagatcttcctgccttcgctggagggcaatatgcagcagcccagcgagttccactgcatgatgaactggacgcacatcgcagcctgcgtgctcaagggcctcttcgcgctcgtcgcctacctcacctgggccgacgagaccaaggaggtcatcacggataacctgcccggctccatccgcgccgtggtcaacatctttctggtggccaaggcgctgttgtcctatcctctgccattctttgccgctgtcgaggtgctggagaagtcgctcttccaggaaggcagccgcgcctttttcccggcctgctacagcggcgacgggcgcctgaagtcctgggggctgacgctgcgctgcgcgctcgtcgtcttcacgctgctcatggccatttatgtgccgcacttcgcgctgctcatgggcctcaccggcagcctcacgggcgccggcctctgtttcttgctgcccagcctctttcacctgcgcctgctctggcgcaagctgctgtggcaccaagtcttcttcgacgtcgccatcttcgtcatcggcggcatctgcagcgtgtccggcttcgtgcactccctcgagggcctcatcgaagcctaccgaaccaacgcggaggactagggcgcaagggcgagcccccgccgcgcttctgcgctctctcccttctcccctcaccccgcccccaccagcccagtgcgccctgccgccgcgttgggaggccaagctttaaacatctctggttcctagtttctgattattcggggatgggggggatgggaggggacagggattcacgatccatcgcgtctgcgtttctgttgtcctttcttttccacaacaccctggttttggggggaggcggggtgcatttgcgggcagggttctctgtccttccaagtggggccccgacactttggttccagtcatcgagggggttgggaagggagggagagggggcgcagctcgcaggcgtggcaacttgaccttgggggaatatttcacatccatccagagctcggaatctacagcgtccagccatttccagcaagagcgcttcccattccggagacgtttcaaccctgcagcgggaaaggctgactgggaaatccattttgggtgggcaatttccttcaacgaagccggaaggcgagaagccgcggcggggccagcttgcctgccggttttcaggaatctaaactctcatcttgtgcaatttatcaggtgtggaactgttctactgtgcgtgtggtgtgctcgtggtgaataagatgaaatgtatatcagaaaaaaatctatctctaatttagagtgcggtacataattatatccgcaaataaagaagagacaaaggcttgcgcggcccggtgtcgggtttgtg

SEQ ID NO: 11 - DNA, 3049 bp, Homo sapiens
tactcggtgtagctggtccagatcttgtcctcgctctggtcggtgctgctggcaaaggcgcaggtgcccgtggagctgcacgccaccatgtggaagcccgactcggacagcttgtcgaaggcctgctccaggaagttgaacttgaggtaatagcgcgaggtgtagcgctccgggggacggtcggggtcccggctttcgttcagggtgtccccaaacacctccttggccagcgacgtctttccgcaaacggtgatgcgcgccactcgccggaacttggcgtccgcctgcgcgtcccgcccgatggtgtaggagccgcggtagccgatggtgatgtagcccgagcgccggctgccgtccagcgactgggacggcgtgagcagcgggcccgccgcgcccccggacggactgcggctagccagctccagcgtgggcgacggcgccccggcagaggcgccctcctgctgttcgggctccgagtagccaagcggcagcagctcgtcacccagcgagccctccttgtgcaccccgcgccgcgagggcggcggccccgggccgggctgctggggcgccccgaggcggcgcacgagctctggcagctcgaagtactcggcctcgcgctgcagccggctgcgctcggggaagtagtcgggcagcacgagctgcaagtcccgcaggtaatccaggatgtagcggaagaggaagccgtcccggtccagaaagaagcggcctttgctgtcccgggccagctcctgcggctgctgctgcgtgaacatgcgccagagcagcgagtcgggcaccgacaccaccgtgcagcgccgggtcacgtacacctggccccccacgttcagctccacgatgtcggggaagagcggtggctccgcggaggacgacgaggagccactgccgcccccgccgccgcccccgttgggtaatccacgtgtgctgtccgccagagccatgacagagaggtggccgggccgggacagtggcaggaagccgcgctgcactcaggagctgcaaccgccttccccggagccccggaacccggacgctcgctcagccctgcgccccgccgccgccgccgccgccaccgccgccaccgccaccgccgccacctcctagagccgcgcggagccgagcggtgcgagcgcgccgctgtgcgcccccttgagttccagtgcgctccgcccgccttgcccgcgcgctccaggcgagtgccgggtcgcggcccgcgcgctgcttaagtagagccgcctgctctggtgccgtggcgcgcaggaggcgtgggcggcggcggagcctcgcttaccgggcgaggggaggtggggagcggggactcgatttgcatcttaaacgcggacgccacgcggggctgctggctccaccccggctcgcgagcgctgggggcgcccggactcccacccgctccccacccaccagccccgccccgtggtcccgcccaactttctccctcttccgaagaggacccgcccgagacttggcggcttcggaagacagctccttggagggacagtcaccgcgccccctcccctctcgccccagcccgcacccaaggactctggaaggaggacgtgaactttcggaagcctgtcgccccgggagtggaaatgcgtggccgcctccggccctcccgcctgcggaactgggcgcttccagcagtgcagctgcggcctgccatcgttggttgtcgtgtcactgaaagtagagagacgcgaaaaacctggagagacgaaagagccgccccagtccgagcgagccagattttgttcaagttgccttgcagccagcctggaaaataaataaataaacctagaaacaaaaagcaaacctcagtgtcccgcagtaggatgctttacgatagtttattttctggctgcagagacaaaatgagatgaagcttcaaatctgctcttaattgcaattccctcttcccgcagggccttcgaggcacttcacttcgaagtgaaggggtaagactccggaacgttcggtctccgggtcccattcagccttcgttgaatcgcgcccttagactcacaacagttgcagatctaacgtaatttttaaagccacctttggcgcctgcatgtttatccttccaaaagtccaggcgccccttctctcccgcatgcctcggtcactcttcggccctgtccaagttcccgtcagtctcagaaagggatatttatatatctgaaggcccttgtctggatcccatctctcaactcctgctgcctacacgtttgcttttccccctcggactgcagcccacagaaccgccccctccccctggaagctttccctggcttcccaggtgggtggggcctctggatggctccctacacactgtctgcgctgctcccagcacgttctgaaatgtcatatttatgagtgattatctgatcactgatttgggtatgaaaataagtaagagctcctgaatgctgcaaaaagagaagagtgcagaggagggtgtcaagaaatgattgggtcactgaatgtttcttgtgtacctgctattatttgcagggcaccagggagtgaggaatgcaaaggcgaataatctccaaagcgctttcagtgtagcccaataagcaaagggtcaggggtctgcgcagttatcacatcagtttgaagtatagaccacacatcaggataaatcaggcaagatctttgttcttgataaaatttatccttctgtgtaactacccagtgagcttcacagtctcctcacagataaatgtcatttttattttgaaatgtttatatctgctcaacaattaccgcgctcatgtcagtgtgctgaaatgagatcaacccccaaaccagttatcttaattgcaagtacagattttgatactgaatgtatttcaacattctttttttgttgttgttctgttctttgggataaataatagataacacaaaacttccaagtcccagtgcaggatttcgaggtggttgtgctactaggcgttatattagtgtcagagacctgacaaaaccagcctcttttctacaaatccaa

SEQ ID NO: 12 - DNA, 4721 bp, Homo sapiens
acgtgaagcccagcacctccccaagcctttgcctacacacaaaaagccacgttctagaggctctatttctaacttaagataagcaggatattttaaaaatcatctactcaccagttggtttgagaaaatccatcgggtatctggagtaaggaggggggggagactctgaaattaaaaaagcaagagaaaataaaggcccagccatgagaagagagatagaaacttatgataacagaggcattcttttagcccaactgtttgtcttagctgtgggggttggaggcagggcccgaggcggtgattgccttgatatttagctgtcagataaacaaaagaggccgcctggcgccagcctcggcgctccgctcctccacgtctgcggccgcagccgccgcgctcggctggcccggctggaaaccaccggctcggccggagccgcgcacttcacagttcacagggcggggggcgaccatgccccctccccgtcctcggactccagacccagctcccagcaacctcggctccccgccccggcccgccccccaggcgtgcaattcacctctgcccccgccggtccgctcggcactcgcgcgggggacacggggctgcccattcctagcgcactcgggagatgcatcccaagcgtgctggggaacgtgggggatctgcgggcgcccggggtgaaccctcacatcacactctgtgtacagagacgtagagtaaaggaaggaatggagaaagctgagaggataaaaggaaaggagtttcagggtctcagccgagaagcccaggccccagcgcagtaagaggcgacaacgtcactgaggcgccggggccccactaatctacagacttatctgtgcggaaggaaggaaaaagtaggggacacccaacttctcctgcctgtttgttcctctgcaccctggggctggcagagttgaaaggagacagatacccagttcggccttccatccaactctctttgccccaaaactccaaaggtgcgcggccacgacagtatctgggccactggtgttcgacgtgattctccgtatttactaaaggagtaaatacggagaccttccagcctttatagcacgcctctcccagccttccttggcgggcctggaccaaatccaactcggccacacacctcaacgtctttccgggtgcggggaggcgtgacccccccacctccctctgcacccccttgttgatccggaaatgaaggcgtctaatttttaaccgcagactgcaggagcagtgcccgtagaccccttcggggcaacacaggagaaaacctggaagggaacccccagggaatgccctttgagtttccccttgtcccttctctactttcagcccccagtctcttcccaggagggtatgcacactctcccaggagggtatgcacactctcccaggagggtatgcacactccccctggagggatggctgcacaaacgcactgccctaggggcttttcttccagcactggcgctccggaaaatgttgggggtagggggacaacttctcacctagttcgcagagtcggctaaggtgatgggggttgcagcacaccagctcggggttgatcttcccgtaagattcacagcaacacagcctcttgacttccgaggaatgcctgagatccggccacctgaacactttgcacagcaggagggggagcgagtaggacgagggcggctgcgcaggctgcgcgccggcgggcgcccccgggcccagcctgcagtccaggcggccgggcagcaggaggcacgcggtgcgcgtcccgccgcgggactccacggcctggagcagcagctccagctgccgctccttcagtttcttgagcaccgagtgcgtgagcgccttcagatccgcctcggcgcccccggccgcgccggcgcccgcggctggcgggtggggatggtggtgacctttggcacctcgcaccgccttgcccaggcagcatccagccctgcccgggccgccgccaccggccccatgcgctcggctgtccgtcgccccttctccccgcagctcgcctcctcctccacctccccctgcgccctcctcctcgtcctcgccgccgggcgcacggctcctccagagacgccggacgagcgcagatcgtttggtcctgaacatgcggggcgaggaggcgaggagaaaagtcgtttgcctgctaaggagcgaacatgacctccgcacaccatgaagaagtcgggcgccgagttggggcagcaggcgcaggcgacagcagcagcagcaggggcccgggcaggagcggcggcggcccgaggggcgctccgtggcatgcgccagtctcccggaggccggggcgcgcgcgggggcccgggggcgcccgccggggatcgggggcctgcgctccggctgccccaccccgcgcggcccgcgccctgcgcggctctccggccccggcgcgccccggaggaacccggccgccgcttccctggggacggccgagcctgcccccgtcggcgcctccccaaaaagaggcccccccgcagtggctcccgaatgtcgggctcgccagcctcggcttcctacatggaaggtccgcgggggcaaaaaacgaaaggcgttcggctgggctgttggaagaaggaaaaagcctctttcccccttgctaagcaacttaatttgggggtggggagaagcaggcaattaaaaaaaaaaaagcaagcgatttatttttttcctctatatccttagtaaccggatctcctcgaattccgcgcacacgaagactcaggggagggggccgagtggacttcaccccgcatgagacgtctggcaaaataagaaggctctcgcaaaacctaacaaccaaatatgcaaagccccaaatgaaaaccaccacctcctcgaacctcagaggtctgggggcgtccggctggaactggggtttaaaaaaagaaaatgtttacaaagtataacaagatgtttgatgggtggaaaaatgtatccacgagttacatccccccgtttccttgcaaagccccgctggtcttcctctccttttcttctgccaaaaaaaaaaaaaaaaatcgtgtatttttttaatccacagaaagctttggctagaccgcttcaatcctgcgcatctgggtggtttaggggagtctctggtctttccccctgcgctcctgggggcccaggtcctcggcggggacttcctcgaggctggcgcgggcgcaggggcagaagatgctgcggcggcggctgagcccggcggggctgacagcgcgggggagggtggcgcggcggcggcggagggccccagacgggtcgcgcgttctcgccccccccgggcacaagctgcttgctagtgcaggggccgccgatgtcccttcccctggccgcggctggccgccgaggctccccgcatgggctgctcgcctcgacccagctgcggcggcaggaggccccggtgtcctctcggcgcctcctcctccgagactctcctcgtcgcgcccgggagcctccttgtccccggtccgccctctcctggcgctccggtccttctgccgccgccaggggctcgccgcgccgcactcaggggctcaggggccgggcgctcggcggctcggcgccgacggactggctctgtctcgggcagctctctcccgcgcggcgagcggaccgagcacggcgcccggctggctcggctggcgcggctcggggacaggatcttccgtgcgccgagcagcaagcgagtgtgcccggggctcaccgcctcccgcaaggcctcccgcccccgcccccttccctcccccttcctcccccttccctcccccgcccccagccgccgcagccgcgccgcctcctccccgcccccccgcaccccccctccggccctctgctcggctggttccactgcgcagtggcgcgcccggctccggcctcgtcacgtggccgtctagacaccctgtcgctttaaaaaaaaaaaaaaagcgattgtgtttcgcaaacaacagatcgggtttctaaaagctatttctccccccaaccccccgccaccgccaccccctcccgggtctgtagagggggtaccgatggaggggagagagataggtggggggcagagaagctcccagaatggattgagccccggccggagccatggagaaattggaaaagcagggagcaccgagcgggcttcgccgcgagttttggagctgagcgagcgggtcggtggcccgatttcgacccggctgggtttcgcggtggccatctcgcgcgcgctcgccctagcgcttcattcattggttttgttttaaaggccctggcggtggatcccttggccgcgcccgagggcaaggggaggagagcgctgtctcggtttaaaagacatttataccggactggaccgaggccctgggaagtgtgcgctgaggggaacagccgccgagggcggggaggcggcgtgaatatgacctcagcggcggccgcgcgctccctcccgccctctcagctccgggctccggtttctaggactgcctggagaagtgtgtcttgtgcacagctctggaatgcatttggccggctgacgagctgtgaggggcagcatcccggcgggagaaggggagcgggggtgggggctcgcctgcgcgccgcgggcaggtttcctcccgggcccggaagacctccgccacccgccaccctgcctcccggcgcgggaaggttacccagcg

SEQ ID NO: 13 - DNA, 2146 bp, Homo sapiens
aggtttgtgcacccgggtagtccctggctgctgctgccaggctgcctcagccggtcgctgctgccgcggcgactggcgacaagctaccagccacctacgatggcccaaggaggcgaagaagagcaagcgatcaggacaccaaaacggttatcggaggcaggttcccagcacaccagccggccgagggccgagccccgcgggcggcagcaagttttgggagctggaggtaaccgaattaaaaggcgccttagaaactccgcttcgggactttgctcagcagggctccgggttggagggcgccgaggcctggcggacgggacagtgggaagagagaaaggtgctaaggggacccaagatctgggatccagaacaagagggggtggggaacaactctaccaagccaaacagatctatttcccttgcctccatgttggaaaaattcaggttccatatggctcctcgggagggagggagggagacggtggctgccggcttccccccagggtctcgctggagaagggagatgagccccccgcaagaaccccaccttgccaagcacaccccagggagagccaggagagtaacaatagctggggaagccccgagagaggggataggccatcttccaggacttaaaaaaattaatgggagaaagaaaaataacaagaaaggaagacagagaaaggttgagactttcttagcagccgcggagaaaattcagccctggatctggctgctgaaagaaaagagagagaggagaaaagaggagagaagcaggaagacagaggggagagagagagggagagagagagagagagagagagggagagagagggagggagggagggagggagagagagagtcgctgcgtggaaggaagcttaaagcttgtgaactcttcttgaaccgagattggagtcatatgggccataaatcattgagacatactctccgccattcacaaactgatagcctatttcagtccagcttaccttagccaccgacgaggggagaacaggcagacataatatatattcacatcgagccccagagcgagcggcaggcgacaaatctcccctccttgaaggcaaaggaaaaaaagaccactgtttaaagctgcgtcgccccccgcccccccgcccccgccccgcaaagccaccccggctggggagcccgaggggcagaccggccagaggagccgcgcggcgtccgcttcaattcactcggcttaggagcaggggtgcgcaggagggagggggtgggggagcgggaaaaaaaatagaagaccgaaaggtgccgggcggctcagctcgccagaatccagctccgggctccagcagggctaagccgccacagtgtggttgccctataagactggtacgccctactctccgtaacaatggcctctgcttttgcacagggaaaaaaaaccacacagacacacacacacactcactcacacacaagctcacacccccccacctctccccctttagcaagcttagatgcctgataaggagggaaggtgatggtggtgatggggaaggggggaaattttaaaatacccgcctccccaaaaaaagagtaagaagaaaagaaggagggtttttttttttttccttaaagaacaggtaaaaatttaaatctagattggagggacagggaggaagaggtgagcaaaggcaaggaagggcggtgaagttcacagctccccccataccccactagtgaactattatgctaatatgagaagtagtatttggaggctgagtcaaaggcaggcctggcccgggggtgagggtgccgggtgcccctctgcactcattcgcaattggaacaccaggacttttttagaaagtagttctgggtctccaaccctcacactctggctccctccttctgagtctccagccccggcttcttccctccactacaccctctctattcctcccaaatctccctccagtctccaggcccagtctctaaccaagggagagggaaagaccagaacttaaaaaaaaaacaaaaaaaaaacacccctccccctttttctttttgagaacagacaacaagcggtgagtgatgattttaaaaactctgaacatcttgcagggggaggagggttgagaaaagggtgacaaaagga

SEQ ID NO: 14 - DNA, 2427 bp, Homo sapiens
tttcctggggtctgggtggggagccctttccagtaataaacatgagagggacagagaatgccagagagcttcctgttgggactgggatggctggagggcatcacagcactggtttcgaacactgaacggagaactgccatgcaacaagaacctgggcacatcagacccctgcaggcaccctcgggacccacagatcgcacactcgatgggcgctcgcaggacgtgaatggcatctcggtaacgccaagctccaccccagagccacagggtgcctttcaccaggctacggagcctcctgggccacactgctcagggacattctgcaggggaggaaattgctcttttttttttttcatgattcttgtatgaattctaattaagaaacattacattcagaattatagcactcacagtgatagttttcagaagactgtaacagcttctttgctacttaaggggtacagacggtgcagctgcttacctgaatgacttcttaaatgagtgactaccaccactctaattttcctagttgtagctctgttacaggttactgaccacaagtgttggcaaagaaactgttcttttaagcactttggcgctccctggagtgacggccattcccagcagctaaactgtatcatactcccactttaactctgtgactgtttcagtatttttaaaaatacaaatcgactctccaggaaaaaacaaaaaaacgaaaaaacttctcacttccttcaaatccctggtccaggctcacctgacctcctgcaagctgcccttcagggcaggtcccagccctacctgctgcgtctgcttctccaccccactccagctgagcaggcagagcctgtccttggaaacggcccggccacctgggagggaacaaacaggcactgcccagacccggagctgcaggcagggctcagcaggaccccaggcgggcacacaggggctcatctggagggacctgaggggcacaggctacagtcgggagagccccgggcaggcacacaggggctcatctggagggacctgaggggcacaggctacagtcaggagagcacagacaagaggcccccgaggccaccagggccgacttttactttatcctaaggatcagggacgcaaaaggattttaacaaagacggccacaccacctgctgcagaatgagtataaatgcccttcttagccttcgaggccggcactggcctcgctgacccctctaatcctgccacctgtgcagcaggcggcaacagggacaggcagacgacacagctggggccagaggacgacgcagagagacccacatcagagaccctcggggagtgacagagcccccgccccaaccccagtgagtgggacaggctgagtggggactgagcacgtctagggccagagtgggagggccagccgtgccggcttccaaagaggaccccgggaaacaaacaccctcccactcggcaaggacaaatcaagcaactgccgagacaggtgtccgcgtcccaacccaaggctgcccagacagacaagcgctcaccgccgcactgccctaacagctgctgagacacattcctgcagccgcctcagctagagccagggaggccctgggagaatggccttgcctgctctcagcctcctctcatcttcaggagccttttcccccctttaccctaactgacatctccgggcccctcatttgctcagagtctgctcagtggggcacccaacggtggacaggtgagagaggtgaggggctgggctgtcaccgcggccaagggagccatggccctccagcctgaacggcttctgcccgaaatcaggacacaaacacagcatcatacacagcagaaacagcccagaaaggccccagcccagatggcactggaataaacagttttccccaagtcactttaaaatgaaagttttgggctacctacttctaaagaggacttcaggacagttccaggagttcctccatgacacaccccatggagaatgcttggctgctgcgtttactcaatgtagccattgaacagaaactcaagagcgttgctctgccagcctgaaaccttcttcatgcttccagccatcagggtttcagccaggtcagaaacaacagaggcagtaggctcttccagaacagcagtgtgaggctctccacagaccctctccagcaacatcactgccagtggtgaacattacaaacagcacccacttaaagtccctaacgtgtcttagggacacacggcgaatggagaaacgcttatccaagaaaaccacctaagtggcagcaggaacagcaacttcgtgacacttgggccacaacctgcttccccatccccatgtgacaaaagctctactcccagcaggcaaccgagaagacaggctccctctcccccagtgccactgcagcagtggcgggc

SEQ ID NO: 15 - DNA, 3015 bp, Homo sapiens
tctccttcttctcctggcagaactgctcgatggccttgatcatgcccaggcccatctcgatgcagcagtaggcatggtcggcccggggctcgggacagcccgccacgcagtagtaacagtctcccagggtgctgattttctcacacttggtctcctcacacaggcggtcgaagcgaccgaacagatcgttcaggagacccaccagggcgtgggcagacttgttggcactcatcttggtgaagcccacgatatctgcaaataaaatactgacttcttcgatctgctgcatcttaaaagggcggaaggctataggagctttttggatggaagactttttcttcctgttcttggggctcgaggtggcatgcctcttgacagaattctcactctcctcatctccctgcttcattaagtcatcggctatgattcttggcatcacggaatgaatcatcctctctttgagggctttttccacttccaggtccttcccgtgcataatggattgccccaccttgaggaaggtgctcctggacctcacctgggacatgacgaacaggtggaccccgatggcgtggatgcagccgtggagcagccccctgctcagcagctcccagtgcagggccccggctccgggcgaggggaagcaggcttcatcccggaaatggtagccaaaggtctcgaaaaggacagagtaggccacccccagacacaaactcaggtacaaaggtaagtgcatgacggtatagagcaaaaagagcacttcgatgcacatggagaagctccccacttgagataagcaagtatctgtgggccggctgtggccgtaaggttggagctgtcgccgcgtcctgagacaggcgtcaagacctggaactgcgcagccagggtcagggcgaacaccagcagggtgagagccagcgaggtccacgcgtaatgccgggcgtacagcttggtgaaggtaaacagaaagaagcccacacacaccaggaggaagcacagcgcgggggcgaccatgacgatcagtctggatctcatgtggaccgcaaaatagatgctccacagaaggcaggcgaagccgatgtagaagagcgcataccggaaccggcgctgggtctgcgggaagcagcgctccaggcaggcctcctccaggttcaccgagtcgaacttggggtcccaccagcggctggaggccctctcgaacagctggggcagcttcttctgcctgcgcagccggcctccgccgcccactcgccgggggacgcccccggagtccccagagctgctgcagctagaggagatgctgtatttgcagtgcttggggtggctgttggaggacagctgcttggggttgatcttgacgcgcacgctgttgctgtccccgctggagtcgcagctcacctcggtgctgtggtgatgcagcagctgctggtggggtggggaagccatgttgtcgagtcccggggcctgccccggccggggtcaccagtacctgccagcaaaacggggagagttagcggcgctcccacctaggcatgcacgcctagaggcccgggacctgctcctgtcctaaggggcggctccagcacgcgacctggacaggcaccatctgttcctgtggttcccggctcagcggtgctcccaccgcccccaccgcccccaccttcgaggcgcacgagaaccgctcgggacggacctagaacgcccgggggtccccgccgcgtggccgccgtggctccgggaccgctttgctcgctcgccttccgcgcctctcgccccgagggtggcctccgcgccgcgcggcttctcctcctcgcgcgctcgcctcctccagctgcggctccggagggaagttcagaccttgagcgctcccagccccgcgagccgcctgcgcacaaacaactccgctggcggcgcggagccctccatcctgcaggagccgcgctccgatgcgtcaaaggcggcgcgcggccggccccgggcccggaccccgacccggagcagcgagcttcggcgggcgcccccggctcgcgctccccggccgccccccgcgctccgggccggccctgcccgcggcggcgggcgctgggggtgggggcgccccgggctgcgagtgcgcggagcccgtcggcgcggcccgtctagtggggcctgcttccccccgagtgcgccgccgctcccgccgcggccgcagctgtcccgggaccgagcgcgtggaaccacggacgcgggcccctcgccgggcggcggtgcagacgctgccgcagagccgggctcccgcgacgccggccgggacgcccgcccgcccgcgcccacgccgggggccgcctccccgagctagagatgcggccgccgccgcgcccgccgccgtgtcccccgcggccgctgcctcatgtcggaagagctgccgccgccaccatctccggcccctgccccgcccgctgtcactgacagacgcgcgcccgcgccgcccctcgcccagccgcagcgcgcacgcgcggcccgcgctcgccgccaccgcctcctggccccggacacgcgcacgggccgcgcgccgccccgccttggtgcgcgcgctgggctggggctgcggggcggggcggggcggggcggggcgcgcgctcggctccgccccccgccccgggcggcgccgcttctaggcggcgggctgtggccgctgtccgcgctccgggcgctgtgggcccgccctccctcggcgtcccagaggccgcgcgccgcccggggtcccgaccctgcggagagacctgaaggcgcctgccgtggaagaagccgctggccgcaacgtttgggaaatcaaaatgttgccttcccactcggcacgcctttgggataaatcgaagtttccaaccgttggatttccctcccgggaggctccccttgctctgtaagcaatgaatgcgggccccggggcactcggcctgccctggacctgctcacggggcgaccttcacgggcctagcctccaaagctgggcccaccgacgaccacgttcccccg

SEQ ID NO: 16 - DNA, 3093 bp, Homo sapiens
gtcactacatccggcagcggggtggcccctagctcctgctgcccccccgccctttctccccgcccgcccccggagctcagccgatttctgaggctccaactctacccactccctccccgggccgccgccgccgcgccttcccccattcttactccctcgaggagagccacaggttgcaaatccaaccaacctcgcaatctatttttgcaaaatcactcacaaagatctccctttcgcgcccgcgcccgctcctcccgcgccgggtcccctcagccacggccacaaagtgcccttctctcctcctgagtcttgcacataaggaacgcgggctggggctctgttcgtctttctcctcgcccaaggtaaggacctcgggaatctgaagcctggcgtccactacgctcaggcccgcagttccctttttacagagcttgcaccatgggaaaaaataaaataaaatttaggaaagggaggcaacagccattgggagccaacacagagtcacgcagcgcccaaaatacaaacaccgcagcggccagaaatcccgccacctttctcgttctcccaggctgtcctgtcgaggttccctgagtccccccgcacactgaaaggcatcgcaggtgcagtgcgcacccctttcccacccaccccaagaagccctgtcccgccatcagtctctctcctcgggatgagcagggagagcgcgcggaggttcccgactccctcgactacaaccaagaaagaataattttcaaagtgttcaacatccccgcccccaagctccccaaaacacaggggcagggaacaccaaaacactcggctctcattaggaagatcacggctctgaaaggaaatagtagacacgatacttcatctcatctggatttatgaccaaaaaaacaaaaacaaaaacccaaagagttcgcttgcattttttccttccaaatctcggttcggctcgaaggcagggaatctaaaagaccgaggccgatggaagagagccagcggggcgagcgagcgggcagcctccctttttgcctcccggagttacccagaaggacaggggaagggaaggaagaagaggcgaggaaaaagaggagggagggaagcggaggccaggagcgacggagcaaggaaagcagtttgcaagcgagaaaagagggaaaaaacacagccgcacgaatccagagagatcacaagccgtacgcaagcagcagcagaaagagcgagagcgcgagcgcgcgtcctctccgcgtctggggccagacagcccccagactagcccgaatcaccccccaagcactgtctcgtcctctctgctccggccgccccctaattcccctccttcctctcctccacctcctttccaaaaaccaaaacaacacaagggagggtggcaaaagcctccccaaaccggccgattcactcaaagacaacaataataataataaatacataacaatctatatcctatggtgggagagacgtgggactaatcttcggcatttattttaacacctgacagctagaataaataaatatatacatttatatcaatagatacacatagaaaacttggagccaaagcatttggcaagagcggaaaaaaaaagaattaaaaggtaaaataatgatcatgagcagcggcggcggcagcggcaccagcggcaacagcggcggcggcggcagtagcagcagcagcggcggcagcaacagcaataatcacctggtgtccggcctttcctagaaacttcttgcatcaccacttctaagaaccccagttctaagaatcaacagagctcaattctcggaatttgagcttcggactttaccactgctacgtggcaggggaggacttggtgtcagctctccgagatttttactgcccctggccaaccaaaagccctcaaagccacaagattttttcactggccggcatatttcgaggtcctcataagcagagcgtctcggatttggaggttccggttcgaggctcgaggggcctgaaggtggctctccctccccgggcccaagacgatggtatggcctgctccgccaccatcacgtgggctcctcctctgtgacgtcggcgccttcgctgtagcaaagctcggcctctggaattctgagaactaatttgctattcggtgacataagagggggagtgcgctttgctttcccggggtctggggctaattccttctttcttacccataaactcagcagatcgagctaaatgcacaaaagggagcgagaggtttgaaccactgggaaaagtatgttatatatatagtagggttagagaggcgagtaagagaaaaataaaataaaataaacatcacagctctttccaactagaatattaggcaccacgagaaaaatatttgccaagcagttttcggtgggttcatttgctttatttttatttaggacaggggtttttgctgttgttctgggtttttttctttctggtgtggtggcttgggatttttggtttctgtattttgatggtttatggatttttgcttctgattttttgccttttgcaagtttgtggtgttacgtaaatcacaggatcggcatcggttggatttttttgtacgtgccttttctttccctatctaatccctcaagcgttttaaagatgtattatttcaatactaatactattgaaagaagcttaaatttttggccatatgtaacaatcccagcccccactttttttttttttttttcctttggtgcaattttctttttcccccttggacttttgctgaagtgtgtctctcctgcacttcagagaaatgttcaaaggatttgttttggtttggtttgtttctttccaggacagcaagtggtgggtttaatctgttattgttgactcttgggaaatttcttgttgcaagaaacgtgtgtgtgggggggagggtgggggtggcggggtggtatgtgtgtgttttctacaaaattctgtgagccaaatacctgtttgtgttttgttttctcttaaggtcttgagatttttgttttcgaggctcgtttcaaggtcgttgtaaaaaaatctcttcagtctgtgtttaagagatcagccgg

SEQ ID NO: 17 - DNA, 2436 bp, Homo sapiens
agttctggatgacaaggactaattgcccagggcgttggccgagaggaataggaagagcgccccgtggagcagggcgggcgagaagagccgggcggccgcggggtcctcgcgcatgctgggcaggaagaggaagagctgcagcacgaaggtcaccagggagatgcacaagaagtaggcgggggccaccacgttgagcagccgcagggccagcatcctcgattacattcctgcggggcccggggtgagaagaggactgactgactacggcgtccagggggcgccctcgcccgctcctccgtgccgcgcgtctggggcactgcacgcgactccacgcccccaaccccctgtcccgcggatttcccctccccagttccctaaccccggatcaggcaggccagagacccgagcccgcagcggcctcgggtctaggccccacctgggggtgagtgttgcctggggttttgagcgagctcggcgccttggcgcggcagagtctggcacaggagggagggactcgtttgcagtctttaggagttgtgagggtggggggcaccgggggataggactcctcccctctgtggatgtggaaacaagcccaggtttgggatttctggttcagacctccctaggaggagaaagggaaggatttggggtcgggggcaggagaatcagcggcacttgacctgctggaaatcctgcttcacactcccctttctccgtccctgcgtccccacccacacacacatcttgggcagcactcagggacctcaccaggttacccaaggctctttggaggtatgtgtgcgtgagggaccacgatgtgtgtgtgtgtgtccttgtctgtgactctgtacgtgtaatctgtgtgcgcttgagtatctgtatttgtgtatgtatatatctgcgtgtacagacacgcagcctctgctatctagctttaaaaaaatcaattgaaacaatcgatacactcacactcgctctcgggcaccgggtgaggtgggggcgcaaccagaatacctgtgtcagcgggtcctggccagcacatctctccaacgctggctgcccgggctatttctttgcgaagagcgttttcatttgaggcgaaattaaaatccccccttcgcgcccgcctcccgccctcctgctgagagaaacccaaacaaccctcatggcgccgaaatcctttccatgccgacaagcccgccctgggcgcacgagtggatgcttggccagcctttcctgggatcgaccccgccgccgtgctcagccctcaccacgtccccatcccaccccacgcctcacagccggggttcctggccagcttcggaagccaccgagaaataggattccgtgcgcccgagagaacttttccaggggctaaggaatcggccagccggaggcgcgagaaaagttctgggaaggcggttgcacctaggatgggtggatgccacggggcctccgtccaggctgtcccgtccgcacgggtcgactggtcaccttggaatcccctttgcaggtcccagcgccccccgggaacccgcagcctccgcggagagcgtgggcctctccctaccgctggggcgcagcgcagtgcacgcctgagggtggtcgccgggggctgggcacgcccccagtcctgcgccgccgggggctgcggcggtgctgcccaccccagagagccctcggcctggggctccggcgaagcaagtgccttcccggcgccggtcgccaggggggcgcgggagcagccagatgcgccgcagcgctgggaaggcggcgaaggacaggggctaggggagtgaggggcgctcggcaggcagcctcagccctggccctgcgcgggagaagggacagcagagaccgcccgtggggccccggggtgtagggagctgtccgttcagccctggcgcccgcctcgcccgcggcagagggcggcacagccggagccttggaaagaccggcagcgccggcagccgcgggcttctcggccactgcctcccggacgcacgggaagccgccccccgcgccgccgccgccgcactgccgccgtcgcagaggggtgaggaaatcaactcaccgagctctggtcgccgacaagaggagccccggacgccggctctcgccctgcccgaggctgcaaagttgtggactcggcccggctggctcgcagcctgcgcttcgcttcgggaactgggcaagtagcggggatgtggggaggagggagcgggcagctgctggcttcccacttgggcgccagcgagtaagggccaggaagcggcggggatggcagctgggcaccccccagccccgccacccctccctccgctcctgggggcggtgctctggccgccagtctcagcatcgtggacttgccccctcctcccctctcgattccccttgagcgggctggggcgccctgcctggtttcagcgcccg

SEQ ID NO: 18 - DNA, 17219 bp, Homo sapiens
ttcactgcacaccatccatcctttaggctgctagcgtggccctcagtttccttcaagccaaagacacattatttccctgtgaataagtgtgtgaatgtggttgtgtggcccactcttctgtacccaagtcggtctcactcactcggcaggaaagtcttcgtcaggcattgaggagtgtttgtcattcagcctgtgtatctaagcatggatgtatgcatatgaatgctttttgtgtttccaagtgaccctcttcacacctttaaatgggctattgtctctggaacgcacttacagaaattctgccccagtttccagctcaacaaagtctgggatttttctctcagaatatcgctatacatctctgtatttgcatacccatgtttacattccccttggccagttctttatctcttatgtatctcttgttccatttgggcaacggagcccaagtgtcttgatttgtctcagcacatgtcattcaagcgcacatcttaatctgagcattcgtactacttccattctttttgctttgcctataatgtggctctttcccaggccagaccaatatgggtttgcagtttaaatgtaaacagaggatcccttaagatcacaaactcttaaagaaaggaagaggagggaggaggagactggaatgttagtaatgagttatttatgtatagggtaacccatccgcccatttcaagctgaagaaagaactagataaatgtctgcagaggtgtattaaaattttagaccaatttaatattagccatatatatacacacacaaacgatggatctcacaacacatcagtgtccagctcctctttggaggctgtctccttgcacatatctaactcctcacaagttcctggttaaaagtatgtctatttatatagagacaactcaaagaccgctttgctctcttcagtgcatacctgtacatgctggcggggcatttcaggctcaggtccttggtctgcagcagtcatagtcagaggccccacccgactacagctatgtgcagaccttcccgtccttgaacacccgcatgaattctctttgggaacattgagtctacgtctgtcttccaaactcagtttttaaagtgagggtgttcattgtgtgtgttcacagctccccgactgagaaatacctggtcaaactagatcatctagcagctgcgtttggtttgtggaagaatcgagcccgatgcaccaagatgtgaccgtgcacacataagagaaaggaaaaccctaggcccagactcacagctcctccccactgcgagctactctgcctccaggaatttccactaggctctttgcccccctttccctattacactaccccaccacggcctttaaagggttaagagaaacccccacggccttccctccacccagctcctgggcccggaggctagctcgctcactcgcagctcacagagtctgctgccatctccgcgcctcccccccctccagtccttcagccgggagggagcctgcatgcctgtctagaccgatctatcaccggcacaccaacaacacccgcgagagcgcggagaccctgcccaggtcccccggcccgcacggttcacggcggacagaacccggggagcgtgacggtgcctgcggggtgggggtagggggcccacaggcactggccgctccgagcgcaccacgggtcctctccagctccggccccccgcgctcccaccagcccggctgccggggcacagtcacagctccgcgcgctgggcagtcctatttttatcttgtctaatcctaaactgggcggggagcacaggcgtcgtgcttagagaacaagagataggcgcgggaggcggggaggagcagccaggcagcgacgcgagcgggagcgagttaaagacacagtggaggcgaccgcgggcaggaagaaagagcgggctgcgcgggcctcgaggcgccgcacgcaacgcgccgccccgcgaagttacactcgcttccccgccgtccctcgctaccggcccctccccacttcccagcggcgctccccgcagcctggacagcgaggccccggcctgtgtgggaggcggaggccaggacggccctgcaaagggctggagagaatcgctaatgagctgtgcagcccattgatccggagaacacttcctaattaactctcagtcacctactggtgacagcgcctcaaaggacagcgctggggccagccgagccccagccgcgacttgccggccgggcgcctgctgcccaaaacccgcgcgctcccctaaacaccccaaggcaattggtgtgcgtggcggtgtatacccgcacactgaaggccagcctcggattaaacctggatggcatattaatcatcgccttccccccccactccgctctacgcgctgaaaccctgcccaaaataaacacgaaaaccaacactgcaaaacccacaccagataacaggtcgagagaggagtgggcagggtcaaggaacgagcgtattccctaagtgtccacgtacaggaatctttgaggctgacaattaaaatgccttccacgcaagcaattctgttggcaaaaccgaacccaacacttcgtaaggattgatttcggcccgcggtgtccgtttccagtgccacaggaagtgtcagatggccagaaatacccaagtctgtctgcactcaccacccaccaccttctggggtgggccatttcctcctagtctttactcccaggccattttaaggatctttctccaaaagactacccctagaaccaaataccacactacccctcctctagcgtcttctcaaaacgaaaaaagggggggaaaacacagctaaaaccccgagctgtctagtctagacgcagcgaggctgtgcgaatacctatttgaagcgcgttggtttctttttaaggtttgtttctaaatacacataaccctcctccttccttcttcgctcttccattccccccacccccaccctccagacgccggcggcgcgcgccctggcgcgcgggcactcacagcctctagctggagatcgcggactttctggaaaagattcattaacagcaaattacgcctcgcccggccacggcctacacgctgccagactcgtccgtctccgggaccccgggaagggcccactcgagcgtgcgagcggcgggaagcccgccgggaccacgcgtgacttcggccgccctactccacacacggtgccccaaggctctctccgtaaacagcaggcgctcgtcaccgccgccgcgagcccccgagttggcggaggctctgcggcgcagccgcccgccggctccgagcgcgggccccgcggcgcctcgccctccccgccttggccgaggatcttgccccggtgcgcaagttcctcttcgcctacagcctccttgccacacgccctccgagtgggaccaacttcctccggccgcagactttcacacgcccatcagggctacccaccagactccccattgcccagcggagggcccaggtctcgcccgcccccgccctccctccacgacgctgcccccgcacaagcacattctacacccacccctgggggctcataacttaaaacctacgctgaacatcggggagggagaggagggggaaagcgggagggggatcgcagattataatcttaaaagaacatttacaaaacaaagcgtctgacctggctggcgggcgggccaagtcggaaccccttgctctgctcgatttcttagtagtttttttttttaatccacgtgattcgtgctttggggcaagccaagaaaaaacgggactcccctcccgagttgcgcggcagcggcggcaggtcgagctcggctcggcccgaggcactcgccacacaccctcgcgcacgcacacgccgacgttccacttggaggaacgaccggcccccggagaggcgagacgaggcggcggtggcggcggctgggggtttttacagttctttcccgagtcgaaaaagaaagcagacggcaacccgctgccctccccttcctgctcgcgagctaacgccgaacccagcttcccagcttccagcccacctcccccccctccgcccgactcgcggcgctcagcggcgaccgcgctcccgcgcacagacacacacaggctgcaaacttccactctgcgaactccctgctctcctcctggcccaccgggaggcgccaggcccccagccgcgccccctccctccctggtgcccacgcggggccgcttaggttggctgcattttaaataacatagctatgaaataaaaacgaaagcgagccaagcagccaaagggaagcgcgaggcaaaagcttcgcggggtacgctgcgggagggggccccgggagagggggccgactgcagccctcagcgcgcccgcccgcccacccgtccgcggtctcccgggggaaaggtgttccgggcactgacctgaaatccccggtgggggagtaggcagggagcctgcgatccggctctttgaagttttcccccaagcggactcgaggcggcgagaaggagcggggggcggttgggtgggtggagagagatatgaggggtggggggggttggcgacgttaacgagcggagaaggagccgggccggagaagcgcggcgagcagcaaagtttgcggtccccggctgcccgcagcccgctcgcggcgccgcgctcactcgactccctcgccgtctgctggcagccggctgccctcggggtcggccccgccgaggggtgggctctgggccgggtgggggcggggcggggcgggctcggggcctccgggcaggtggcgacagccccgtgcgatcctccgggctcccgcagctggactgggcttggccgagctcagcagctcccgcgctgccgccgccgcccgcgctcgggcaggagccccagcgccatgttgacggttcgccgcgagcgcccgctcgggctgggtgtgtgtgagtgtgtgtgagtgttggccaagtcgtccctgcgcggcgacagcgcggcttgggctctccgcccggcggctcgcgggctccccctccgccgccgccgcccgcctagctcccgctctcggtcgcggtctgggctcctgcgcgtctcccccgcagccgccgagctcggcccgcgttcagcgaggagcgcagctctgcctcaccttgccgctgggagcccaggctccgtctgccgccgcacgccgcgatcccaacgcgtcccccctccctggttccctcctcttcctcctccccctccctccgcccgtcctccctcccgcccgccctacctccctccctcccaacagccgcctcccctccccccgcaggcgcagcgctcgggcgacagccgcccgcccgccgccgcctccagctctcgcaagtttgagctccgccagtctccgctcaccctccgctgcggcgcctccgcggcggggtttcgggaggggtgattccccaggaaaggtttgcccgagtttccccggccgtcatcgatgcacggcccggcacgttttggcctctctggatccgaaccccggaccacttgggtggcgccccccctcctcgtcccccggcctcccctccccagctcgggccgagttggctgcgcacgcccgacccgggcgcacgtcctgggcgagccggagaccgacttgggcggcggcggcggcgagggctgccggcagagccagagccgaagggatgggggcggcgggggcggctctcccagccgcgcgccgagactcccctcgctacccagaaggccagtggaggaccgcaattaccataaagcgcctcgcactccgctcagccaaagctgtcaaaccccagcggcagcagccgctgccgccgcctcttgccaccagcgctgcgctctcccggcctcgtcccctccgagacccagcggagcgtggcctgtgtgctcccgtgctcacccccaccccagtttgccccttcctcccagaggagccctttcccatttcggtgttaaaagctacctgaaaacaccaccccaggcaacggtggccgttccgcctgaactccgcgcccgagttccccggacgtttcaattgtgtgggaattgtttggaggtgggggaaggggggagcagcccgtggaggcaccgggaggcgtgtggggggcggtcggcgagcggagatccgcctgtatttctcccggttctcgagcattttcacggtctgtacctctgatggttggaggggctgcccaggcccctcgccccggcgttgggagattatctcccgcgttttattttccttgacagggagcaacttttggcttacaccgttcgccccataaatttccactcggtaacgtcgtgctgatcggtgcttggcggcggcgtacagcctgcgcccgcagcagttcaattcaattgacacgtattgagcttctccagcgcacccggcgcggctctgggcgcggggggagggcgggggcaggcgggagggagggggaagcggagaagcgaggttccggcctccccggagcgcaaagcctcaagggcgagccgagaagccctagttggtgaagctggcgggaaggggtaggagtgggggagggggtattccggactaaccgcgcccagactgcgggcccggacttcgcggccaatggtgaccccattcggctgcccactagggtctttttatactgggaagggggtggggtgtctctttctgcctaaggacaagatggtgcaggctccatgaaacataaatctgaaatggaggtggcttgtaaatccacacggaaagtttttaaaatatcctggagtgtccccatgccaaaaataatcaaaagcatctcaagttgattactaagtcaaggtcaaggccaaaatcagctctagctagcagatattttcccttttaaaaattagactcactactgactgtgggactggtattaggtgcgattttattcattctgttttagttctcagcacatagttataaaaacagcccttctcaaagcagaagtgaaacatctctaccgtttgaaacccgaaacttcggcagaattaaatcttcatgctccagagctgcttataacaactgatgcaaaagacaggcgagcaagtgcccccgcgagcagtgcccagccaggctgggccgcgaacgcttccaggaccagcgcctgcagaatggaatgcacgcttttttcttcctggtctttctgggggtggatatctctgcaagccaacccacacatttttttaatctccggtaacaagcagaaagacacctggactattatgctgtaaaactattttttataaagacattttaggaccagacattaaaagttattagattgaacgcatgcgagttacagacacagctggagaaaaggcctctggttgtgtgttgtggcaacatttctttttgaagcgactccttttattcaaaacaagtcaaaaataaccgggaaggctgaagctgggtatttgtggggaaactctgaacgtggttccaggcgaggaggccgctctgctgctgcaggctggacgggagaactggcctgggccagtgtggagccgtgccaggctcttccggctcggttaggccgaaccgcagaggccctggcccggcgcccagccaccttctatcccctcccctcgtctccccaactctgcccccaggcacaggcttttctcggagttcgaagtcgcatgtaaacgtccagaacttttagaaaatccaggaaccgagctcggggcctgcagcctctcagagtcttacggcctcccggggctgctgacaaagaggcctgtttgtctaactttaaaagtcctagaattcgggaggctgagccaggagaatcgcttgaacccgggaggcggaggttgcggtgagccgagatcgcgccgttgcactccagcctgggcaacaagagcgaaactccgtctcaaaaaaaaaaaaagaaaagaaaaagaaaaaaaaaagtcctagagttaaaatgaacaggggtggtgggggtgctgtaaatgcgaaggggccgaggggagggctgactgggggagaaatttgatgctggagacaaacaggccagtaaattcgcctttgacgtaatttgcaacatcctcccccaccttttctagggatcttgcctccacggtaggctggtaggattaaagggtttctcctccatctcctagggatacatttttcaactccgtgggatttcaaaaatatcttattaagggagtcctaagaggcatgagtggtgggggggattcgtgactcactgggaattaaaatgtgggattttcccgaggcgctataaggcagagggggggaggggagattacacctattggcccggttagttccaattgttctggggaaaacaagcagaaagctgtcgaagggcaatcccatcttgtgtcctcacttaagaaggggctcagggagctggggatgccgcggggcctgcaatgggtgccggcggtttggcccttctcctgccccctcctctcctgccctcccacaagcccttcgggagctgacccgggggtcaggctgctatacccagcactcagcaaggggaggatttcaatgaaaacagaggaggaggagagagtgagcaaaggagtgcatgggaggggaggccgtgcagcccacggagaaataaagaaataggtgccgaaatgagaggtgctgcggatggagcagcgggggctgcccctccgccaccaatctcccttcccatggaagtgtctcctgattataacaaaccactcgacctcaggctaaccaggccctgcaactgggcaatcgagctggcccttctaggagcaggccttgagcctggctgcccttctcaaggcaggttgactctgcaagacccgctagggcctctcccacacacctccagctccaccctggcctaggggaaaggccaggcatcctgtgtttggggggaccctggccttctaaccttgtgtgcaagatttatttataacgtatactaggatccacatcataaagcttataacgtatgtgtaggcttccgatggtcctcctcggaggctgttctcagggcgatgacacttggtactggaacaggtgggactcggatgagtacagataatgtatttttacataatgtgaggtagcctttctttaaaaacacacccacacttatagtcttctggtcactttgtacaagaactctgggcttatccaatggcactttaaaaaacatccgctgccccatcctccaagcacaaggcacagctggcttcccctctgaaactcaaacgaggtaacaaacaggaggcgcatcctcctcccaggatttcactcatctggaaacatctaaaggtagctgcctcccagggcagaagactgctggacttaagggtcgccaggctgaacatgactgttctttcttcttcctagcctttggagggttattgggtgtttggggaaggaaggccctaagggcagcctctccgtggttcctagcaaccatcttggaatttctggtctgggctcgatttgggtcaggccctgagctccccgaacacaggcacgtgtgggtgaactggcatctacactacgggggcccgcagggtggttgggtgtcgaccaaatgggcataatacaggaggcttctgggaggctggccgcctcttgcgctcggcaagggcttaagagccctcgacgccgccgcgctgggccgggtgctcctgcagataaacccggacgccacgtcccgcctcggctgcttatttagcaaggcgccttctgcgcatattttacccggctgggggcagtgagtgggaaccgccgggagagggggcggggaaccaccaactactcgccttcggacccagtgtgccggcctccggccccagccattttgtatccagcttccctcctccactcccaccgggtccctgcgaagacgcaccaccccgaaccccttcgcggtaccactcccgaactggaggggtagagaaggctctgccagcccctcgcctgcagcaggaaggtgggtacggaccagcagaagggaaagcggtgctgatctgtctctaaatacctctgccctcccgcccccaacaaagtcggtcacagaggtgagtggcgcgggatggttgcctcgagaaggtcgcagccaggagcaaagctttggggctcacaacggactgggcattccaaacggtgtaatcttcggcacatttcacccgctcccattccaccttccgaaccactctgctctcggtgctcatcctcctctccatacctgcgttcccagcgcgttagcagccgcgcagcccccggccctgagtgcggggggtggggtgggggggctcagggtggtttgtgtggtgcggcctgacagaaccttctgtgtgcggcggagggaggaggctaatgcataatgcacagcgcctggaagcccggccattagcggcctgtcggtgacacagacaaacgactgagagggaggagatccagctcgctctggagtttaaatagaccagcgtggaggggaaacgccatgatttaaaagtgtgtgtttgcagacactcgcatatattttaatgatttccagcaggctatgtgtcctagccttgcatccccccctccccaaaaggaggatgtgtctagaggagggaggatgaaggcagagtgagaggcctcaacccagacccaccagcagcttttgagagatgaaggaggggagaagttcagaaagcgaggcctggggaagccacacgacccaaggccaagcccagattttgttcttaaaataataatttaaaaaaagagccacccagccttccaccctggactacaccctgtgttgtaccagaaaggcctgggggaaagaataaattctgccacccttgcttcccccgggagcccacatttttgaatcttccttttccactgacactccagagacctccttcctcccggtttaacacactagtgttttttagcaattaaggcgagaagggggtggggataaagataagccaatttttttttccgccatgcaagtgtgagagataagataacgctaagctggggcaaagcggctgcttacaacctccccttagcgattttgatcggtcacttcttatctcgcaaaaatgctcttttcgaaaactggatcaaaaaagaaaaagagaaaaagaaaagaaagaaagattttcatttggaagtgacatttaaaacccacctcccctccactgacaacccaccccccattggcggggctccccaggaaaagtcgcacctcgactgcaggatttcaggctttctcgcggggggcaggattactagtgcaattaggctgaataaaaccagggatgcgtgatgaggatttatcctgtatccaacccaagctcgcggctgggttttccttctcttagttactggtcgatgtttgtgtttcgccatcgcactcagtgccttcaaactaaacaggtagttatacttgggagggtcatataactatgtcaacatgaagtggttgttaatgcgaaataagaagaaactcttctgatatttataggcccctataaagggagagaaaggaaatcacactccctagaacccgaaagctcccagccgaaccggaccctcggggagttttagaaatccttctttccgcacaggaatttcgcgaaggggtttccggaagactttgtcgaggaaggttttggtatcagactccacgacctcagagcgccctgcaaattccccccggcccagtggctagccccagaatgcaaacctcaaggcgggcgccccagaccaagctgacctagcctctgcccacccccagctcacaaccccgaggctcccaccccctgcccccgaccgggtcggcaccgtggcgtccggcacatgccaagtctaccgtctccaagccaggctgcaagatccaaaggttggggcctgccgcggacggattgtccctggggagctgaaaccgcccagcggggaaacccctcctctcgcccttccccgaaaagcttggccgcggtctaagctccgagcaagcgggtatccgctgacagccgggcctcacgtaaggcccacacgcgtcccattagtcagcccgagttcccctcgggcgagccgcctggcgcggccccaaggccgggctcaggcggggagagggtgcggggccgcagcgagctgcgggcggaggtgcgggctccgcggagcccggccaggctcggttccgcgttcctgggcccgcgggtaagctgagtcggcggggcaggccgctccctggctggcgccggggcgccaagctgcgcttcacgtgcccgccatatcagcagcagcggcggcggcggcgaggagggggtgctgggaggcgcgcggccgttcccgcggggtctccggaccccgcctccccgcccctccccgtgggggctgggccgagaccaccctgcggcccccatcccagcgcaagccgaaagcggcgctgccagacgcagagaggctcctggggcgccgttccgagagccgcgcggcggcagcagccaggggagggtgctcctcgcggccgccccgccgccgccgccgcagtcacggggaccggaagccctcgcgccgccccgagcggcctccgctggccccagggctgttccagacgagggctggccgcgcgtcacccctgatccctcctcgccccaggcgaccacccgggccctgcggtatcccggtgtaagccgagaggacccttcctgcggtccgatgagatgtccctgtccctctgctaccaccataagcacgcccccccgcaccgctcgcagctccgcagctgggaccggaggggcgcggagccgccactccggccgggcaggaacacctgctcccaggccctgcagctgggcgcgtgctgctgtgagaggctgcctactgttgtgtgcagagatcgcggaggagaaaatagggctccgaagctcagggccaggagcagccaagcctcggccacccccatctcccacccactgcaggcgacagagcgcgaagccagagggcctgctgggggcccgggtctcctttcgaaggtcgaagggccgccacccctgggatccggcttctggcctgaagaggtcgttcataaaacagatggggcaaaacctgttttgggagccttcccagtgtccgcccccgctctccaaaccagacacactcatctccccctcagccctactctagcctccggcgggggacgggagtaggtcatggcggcaccggtactccacccgcccccctccacgtagggacgtagggtcggctgcggggctcggactttgccactccacctagggaagggccaatggacgctccccgtctcctccgtgtccggaggagatccggcggcggagctgacctgcaaggcttgccctgcctcacccaccccccacctccgtcccaccctccccgactctcctggcccagggcccggcccgggaaggcgttgttttgccagcgggagccgagcgagtgcacagagaaaagcctccctactctaatgagagtgcacacagcgctgcagcgaggaggatgattacccggcgggcggggggcgcgggctcgggccgcgggcggcgtgtgcggcggccccgcgggcccggagtccccgcctgtctggctgctaatcgcacgctttctgctgttacggaggcaggcgggagccggcggccgagcccagcgccgacgactcggcgggtgacacggaaacatggcgcagcgcccctcccccgcccgcgctcccgcctcccgccctccccgcgctcccgcctcccgcctcgcacttcctcccgcccgcgcggcttttgcagttttaatgctctgctttcggcctggcaccattacgctagcagccgcttctccgcggccccgcgcgtctctttcccctttgttttcggggtctatagaaaacgtttgcttttgtcccgagctctcgttaaaccaaacttgtggtggcaacggaaggcggtgcaggcggggaggggtccggggattttggcagtagccggccagagcgtggtggaaacttctctcgctgggttctccgctccctcccactccccctccccaacacagagccgccggcctcccgacgcttctcccttcgcccccgagaggccccagtgctccaggaaggtctgggccacagagactgtgaccaggggtgaagaactcagagtgcgtgtctgtgagccccgaggttttggcactcgatgaccttgctccctgcagccccgacttacctctttccctttggtcattcggggctttgtatcagtcggtgaagaaggggagggaagagaaagtgtttctttcgtgcgtgtggtttttattttaaggatttgttggaatctgtcacccccaactgcacagccccctcccgtataggatctagggcgaaagcggggaaacgtcggatttagggggaaagggtcgggtcagaaacctagccctggaggctggatcgtactctcctggcgggctcagccacacttggtcggcacgcggggcggggcgacccagcagagtgggggacgcaagggccaggtccctcggtccaggagacgccaaacgttccaaccttggagcgagagagcaggaacccccgcccccacccaagcgcgcgcgctccctagctcgacgcgcaagccgtggctctccgcgccagagctgctcaggcggcaattttttaagcctgcaattaagcgaggcgtcgccgtgtcctctgctagtgtcggtcctgtcagtcgcacatggccttggtgctccggtccgaggccccgcgattagtcacaggctcgcttcgctccttccctaatccgcctctgcaggcagcctggggacgcggccgacttggcggcgctggcagggagccactgcccgcggggcgggcctcctgaccagtgccagccccgctgcgcccgagccggcgcgggccctggggtgcgggtttggcgcccctcccctctcacagccccctggctggggtggcggcgcccctcctcctcccgcccctctcccgggcctgcgagatctatttgtgtggtgtcatttgcataaaaataggacaagtgtttctgtgcgttcatacgcgggaggcgaaatccttattgatgtgtctgtgtggagccttcgattgtcggagcggtttgatttagggtgtttgtgttgccttctacaagaaaggagagaaagtccttctcaactccttcggcggcctgggcccccagaagcatgtccctctgcgcggccggaatggtccaccacttgggccccaagcgcgccggatccacagcgagcaggttgagggccaggcgggaggcccattatgactcataaaatcgggcggcctaatcgccagctgccaacccatttacatgtggagcttcccaatgctcccttcgcccgggcccggcttcctgagggtttgccccgacacagctagagccgccaagtgggagctaatctagtggcctctccttcccgtcggcagcgtggcttcccttccccggcgacccccgctctcttggcctactgcgctgctcgccagcaactcctcagcttggacaaatagctgggagggcgccggccgcgcggagccagtaaatcaatcattaactcccaagcgaggcctggaccaggggagggagcggcggccagagccgagtccgcgaggcgagcgcaaagcctccaccggggttaggagccacccacgcgccaacgaaccgggtgcgtgaaggcgggtcccgccatggcctcccgggcccctccagaagcctccgcccgccgggcctttcaagcccgcaccttgcctggccaggcaggtcgcgttacagcgctgcccctgggagagcttgaacattaacgagtcgcctcgggcctcagcggcctgctctccacaggagagcgtcccgcgcttgggcaagctcctcggatccggccgggctcctcctggctcaggcttgctaaaccaaactgatcgcaccctgtatcgaccaatctccctgcggcaccctcttccctcagcccacggtggagccggcacgcagggggttaaaagccccggttcgctctggctcctcggctgcgaggagaaaacgctgatcaaagtgcttaaggggaaggtaacacatgcacattcggtcccgggtcgaaggaggccgactggagacggctcccgagccacccgcctcgacccgcttcccacactcccgggaacgcggcggcggcggcggccctggcccgcacgattcgctcggcggagcgctgcgctgctgggctgggagggcggcggggaggaggagagacgagggggcgggaggcgaacccgggctgcgcgccaagaggcccggagccgcagattagtcaccgctcggctctgcgctcccgggtgcgcccgggaaccgggagggcaggcgtcggccccgctcagccgggctccccggtcctcggcgcgggtgcccccacccccacccccgcgcgctcctggcgcggctggctcgactctcggggacccgcgcagccgagatccacttgtcaggtcaagggcaggacagaaactctgcaagcggagtcttgcttgcgaacaggaaatttctccttgatgaggtgctgcccctcccccacgccgggcttcaaaacaaaactccagagcgggcggccaggtacccagcctcgctcgccatggccggcgacctccgctcctcggccccggccccgggcggcggagccaagccaacagagccggcggacggactcggcgccggccccgcggagggcgccaggctgccaccctccggggcccggacggggtcggcgggggtgcggagccccggagcccccgcgcctccccaggttctacagccaccgagcggttttgcggagctgcccgaggccgccgggtcagcggctccccggagggcgtggggggcggggaggccgcgcggcgccgccgactcggcgaatcccgctgcgggagcccgggagggctgcgagctcggcctggcaaagttcctgtggaaactccatgttttgaaactcctgcggcgtcgcagaaggagggggagaggggagcgcgggaagcgcgcgggggcggtctgcacccgcctctccccgccggggagtgggttccgcggccccccgggcctcatgggaaagctggagggcggggacggccgggtccccgggcccg

SEQ ID NO: 19 - DNA, 2264 bp, Homo sapiens
gaccagcctggccaacatggtaaaaccccgtctctactaaaaatacaaaaattagctgggcatggtggtgtgcgcctgtaatcctagctactcgggaggctgaagcaggagaatcgcgtgaacccaggaggcgcaggttgcagtgggccagagatcgcgccattgttctccagcccgggcgactctcaggttaaatcgtgttcgatataaaagtctatatcgatatagacttttcgatataaaagtctatctccctttgacaggtctgatcgaccctccttcctataaagacaaaagttgtcttaacatctaagaggaaccatattgcggtgaaaggggtgctacgaatcctgggttttagctcttgcactacgtctcagtgtgacattggatcccaatttcctcaccaccaaagccaacgggctattataactcccttagaagtagctttaatccctaaagacaagactaaaaatattaacagtgcttgagcctctggaaccgaaccagcactggagttttgtttggtcgtcccctctcttccccctcaagattaacgatctggagggaattctggtgagttcgagttctcgtaacttgttagggactaaccagaagcccggcgagcagccagtaacacaatctctgggtattccttcagcctcatcagtacatctcttcctacctcgccttcctccgctgcagcttctttcaagtccacatctgcgtctccgtcagtttcctctgggattccatcggtgtcggtagcccccgggtccccgggcacagcggccgtctcatccgactcccctgtctctccacctttgtcggagggcgactcgtgggcatcgtccatcacggataggattggaggggagaggagatcgcggagatgcctgaggcagaagctcggaaacccgagctgcacaggccaggatcttacttcctgtcgtcgcgcagcgatgacatcacccctaccgctctcctgaggggtcattttgaggcgcgcgtagaggactagaggactcattttaactttggtttggcgacagtgggaagcgggaaaattggacgtaaagagctcagactatggatcctcctcgctaggaaaccagcacttgtgaaggagcgcagttttgtttactaaataactttttccttttcgcctgtctaaaaatgcaatgtcagttaatcccttcgttaacccctcagagtaaagttgggggactgggagaaaactcagttccgttgtatggcggtgtcgtggaatgaggctccccgggactggtaaactttcaggcaaggactcaaccttgtatatttcaactggcccgaaaccgcgggcctgtgtgtacatagaattgctagcatttcccctccattccgcaagcaccttaacaacaaaaagtcatatagctcgagcagaatttatccaattcatttattcatccacaactattgactgcctacttcgatttagaaacagtgctagtaccagggaacaaaacacacatagtttctacccaattaaatgatttttttcagttcgccagtactgaagattgaggtttgtttttacaagtctgacacttttctatcagtttggttaatctcattaaaactaagaggaaagcctaaagagaggaaggtgtctcctttgaacgtttcactttaatgaactagttcacgtactgggaggatgaagtggtgaggatatttctgttttaaaattttcttctcttccctcattgagatacgagggggagggcgttttattcacctgggtatgactaggtccccgcacctattacatatttaatttatgcgtgctgaaagaatggacttggaaatgtaggtgcgcgttacatttatctctttgtttctacgctgcctggacgaattaccgtatttcctgtcccaggagctcccaaaacctttggggaaggagcgcacttcgggaggcgcgtacaggtgggcctgtttgtccctttccacctgcataatgggggcccacaaggcgctgtccccatgccccgagaggcgtgtctcggcacagcaaagtccacctgcgctggtccgcggagccccgcccagctaggtgagctagggggcggggcgcgggggcgcggtgacgcgtgacgccggatcccggaagtgacgcgctcgtggggaaaaggcagggagggggtggtgtccccagccggtttggggggtgcgttgcccggagacggaaagtttgggagcccgagcaggctcggctgcag

SEQ ID NO: 20 - DNA, 3104 bp, Homo sapiens
gcgggcgctgtcgagcacggggaggtgctgaaatagtcctggcgtgctgattcaagctttgattggcagagccacccggtgactgacagggggtctccatggcgcccgcgccgccaatccgcccaccccaatagcggagccagctcgcctgccggcgtgcctgagccgagccgagcccgaaccccaagccgcggagccagcacctcctccagtcggggtcgtccgctcccggccgttgagccaccgccgccacccggtagtgtgtcccgctgccccaatccgcctcatcaacaagcgcctggcacactcagccaggcccgcgggcatctgctgcgtgtcccgctccgggctcagtgccctcgccgccgccggcactgcctcgatgttccagctgcccatcttgaatttcagcccccagcaagtggccggggtatgtgagaccctggaagagagcggcgatgtggagcgcctgggtcgcttcctctggtcgctgcccgtggcccctgcggcctgcgaggccctcaacaagaatgagtcggtgctacgcgcacgagccatcgtggcctttcacggtggcaactaccgcgagctctatcatatcctggaaaaccacaagttcaccaaggagtcgcacgccaagctgcaggcgctgtggcttgaagcacactaccaggaggctgagaagctgcgtggaagacccctgggacctgtggacaagtaccgagtaaggaagaagttcccgctgccgcgcaccatttgggacggcgaacagaagacacactgcttcaaggagcgcacgcggcacctgctacgcgagtggtacctgcaggatccataccctaaccccagcaaaaaacgtgagctcgcccaggcaaccggactgacccctacgcaggtgggcaactggttcaaaaaccgccgacaaagggaccgagcggctgcagccaagaacaggtcggtacctagaggcctccgcgctttgagcgcaccggggaggaggcgggtggaggcacctctggcgcccttacccagtccctggcgactccaattcagcaggagttgggagcgcggtctgtcttgggttaagagccctgcgttctgggctcctggccgggagttcccttgccggctctgcttccccacccgctggctccccacgcctgcgggcagctgcagcagctggtcccggtcaccaaaccaaggcttcactgggacggagaggggaagagaaataaaaaattaaaatcctacaaacagttagggaccccaagacccaaagctaattcttgtcagcctgggcacaggctcctactattaatcgaagcctggcttattagcaatgtgtcggtttcatgttaattatcattttcaaagcccaggtatatccctccctaatgctttgaaaacagttttcaatggacttttgagaaatgggaagtcgagttttcctcttcccatgcgctgcctgccactcttgtctcaaaacagcaaactagtccgtgggccgaggcttttcgtttcccggagtgtggatctcgattagccaaacattttgcggaagagcccggcctcatcccccaggcccaaatgctccttacaatcctttttgcctttaggtcgggccgacccgatccaacgcgatcgcgggagcacttgctcaggcgtaagccccaggcagacgcaccgttagaaatggtatcccatgtccctgggaccgatctgtccttgtcacccacacttcgtttatttcctgacagtcctgtaaatctcccaaaagtgcacaacaaacagggaggacactgcaagcccagtatataaaagacctgggagctgcggcgctgagaaagggcgcgaatcatggtggggcacaacagtagggacccgcggaggggcggccgcggactcctgcccgacctctgtcgccttgccgagtaatcctcgccttaactgctggggtcttcggaagaacctctagccgccgggctggagggacgcaggaggtggtgggggcgggcgacgggcggctgtgttacgagctgtgacccgtgttccctttcttccccgtagactccagcagcaggtcctgtcacagggttccgggcgggcactacgggcggagggcgacggcacgccagaggtgctgggcgtcgccaccagcccggccgccagtctatccagcaaggcggccacttcagccatctccatcacgtccagcgacagcgagtgcgacatctgagttgcccatccaggatgctcagaagcagattccagtgtaaaaacgagaaaaacaaaatgaaagaggggaagaagatgagagacctgcaaatccagcgccacagaagccaggtgaccagggacccgcgggctcgggttgccgtttcccgccccaccccgcggccggcctggcttcactggcgccctttggccgcgaccacgggaaccagcgtgaggcctgacccagcaccacgttcttcttgctttgctttttcctaaggattttgctgcaaagtctcttcggaacccgaactgcaagctgagcgcctgcccagattctcccatgggtatttcacgtcgaaaggacgctgttacatatgtataactttcgctttaaagtttttttttaacaaaacatatatatgctgtttatttacttatttaagagaccgccatggtaggtttctctgtagcttggggaacttgctgtttctaaacatgcaggctggtggtgatgggttctgtgtggagaagccaaacaataaaacaacctagtgggcaaccttcttaattaagggagctgctctcagattccttttcttcttattattattaatatcattcccttcaccaggcatgcagggacccttgagcaaatggtctccggaaggtcttacctatatatcttttgccttctttggtgcttcctggtatatgttttaaacaacctatggtaggtctataaccacctcccacgtcaaattacacgtatgtgcatatatgtatgtacctatacaaacatatgtatgtacctatacaaacatatgtatgtatgcatacacgtgatatatttaaggctagaaattggcaacatgtgagcgtcctctcta

SEQ ID NO: 21 - DNA, 2493 bp, Homo sapiens
actggcatgactagagtagaaggagggcatcctaattcccagccttatccaccgctttgcaagaaccaggaaaatgaattcctgttggccataaaactagttgcaggtgatgtaacccatcctattcggcctcccatatttacagctatacaggaacaactctctgaaactcagtctcctcacccgtaaaatgggatggtaatacgtgcccctgggagccagcgagaattaaaagggataagatgcactggctcccaggggcaagcactagcagacaaggaatagggcagtcctcccttcacactccacagagaagaaatgtcctccaactctcccaggaggcagagcccagctctccttccaaacagccttggagttgcttggcctctccacttcttcaacgaagttgtgggcagaagacaaatgcagagttctcttgtacctgacaaggagagagaagcagaccctgtgtgagtctcttgctgttgacgttgatccacagggggtgcaggatgggactgaggcaggcccacctgcctggaaagcctgcctgtaccctgaccccatggggccctaacacacaccctcccagccacaggggctctgcagagctaagccagctgtcctatggaggtggggaccctcctcctgccctgccactctctctttctcctggagaggacaggcaggtgggcatggccacaggagaacttctcgaaggtgctaactggcccagagaaagaaaggtggcctggtagggagttgtctaccagagattgagagagcatgggagaagttgagagggaggaggaaagtgcacgccatcctgcgcgcagcctcgccttagggaaagcatgtgtgagaagtggtggtaggcggttgctagccttggaaacaaacaaacagccaaccaaaaggcttcggaaggaaggagtgtctaattaatcagccccgagggacaggtccgcactgcctgactgtgctcctcagcctggtttcaggccaccgagtccaagtttctgccacagttccagggccgaggctgtttccaaagagccctgtaattgttttccacctgtgtctcacccaaacaccaaggctggcgcaggtggacaccttcccacttttctccctccaggctgggccccagaaatcagtagaggagggaggaatcagtcagcgtggccatgcctgggaggagaggcccgtgtgggtctgtggggctaagaggcaaaggcgggtggcggatgtgggccagcgggagcctggaggggttgacaccgcctgctccaccgcaagcccctggaggaagagccccgctgtgcccgagagcgagcgcgggcaggtgtaactacccggggctggggctccgggggctccgcgcagcctccttccctcccagggacaccgcccagctgcgccccgcgccccgccgactgcgcgggccttgagacgctggtggctgcctcggggttggcctgctcctcgcgcacatgttcagggtcatccgcgctgcgcctctgcttcaggtgcttggctagagaaagggcggcaagacggggcagtgcgtgtgcgcgcgcgggcaagtgcatgtgagtgcacacttatgtgagcgcatgtgtgtctgcgcttgtgcgtgtccaggggaaccacagggagcaccctcattctaagcctccagaggactgcctgaagccgctagatagaaactcccctagaatgtaagctccgggggggagggagctttgtttgatggctgctgtattcccagtgcccattgaagtactggggacacattagatgcttaataaacagctgttgagttaatcaacggactctaggaatggaggcagaccggcccttctggaactggagaaaggacaaggccacatttcaccgtctcctctgttcttggtaccagccctggcgtccccggcaacgccaatccttctcacatccagcttgtgccaagttttcctccctgctcgtgtttacaccttctcccctttgtctctgtttcctgctggcccctgtgtgtaagcaccccagcagtcagagtgagaggaagacgaaagaagcagaattctggaaatagagagctaccagggtggcctcttccttctggaaggacacggaaagatggggtgagactggcgctcttcttcagctcctccctttgggaattgggactttgagcttcagtttcctcactttgaaatagcagctattccacctgcctcgcaggattgttgcaagaagtcaggcaggaggctgaaaagttctggagcacatgataggtgctacagaaacgttcgtttcgtctcctgactagcatccaacagtctgggagtgccccaggtgtggctgagggtggttatggtttgataaccaccaccagaacacccctccttttttcacaaaatgccttgaggagaatttaatggctgtcgaaaattaaggcaagcttcatttctaaaacattcaggagtcaat

SEQ ID NO: 22 - DNA, 2315 bp, Homo sapiens
ctgtacctggcgtgaggtctcctggccacggacgttgttggcgtcacacctgtggcacctgaggtgaattgttcagatggaaacggcaccatcaggcaactggcaacagaagcctaaagccctgggtgcctcaggtcagaggaaggaaggaatgcaagggccccgctccccccaatgccaggagcgtgtgttcacagctttagacaggacaacccactgcaaatccaaagcagaaaacatggtccaactccatctctgtggcaccttcatagatggtgcccacctgccttggcagtgatgaccgacactgcgaacgctgtgctggcagtgtgtttaagggctttaactgaatcatctcgatggagctgaaatccagccccattttacagaagagaaaactgaggcttagagagatcaggtgtcaagttctatgccaagcacagggaagcaaaaacaggacacactcaacataaggtggccccaggaatcagtggccaggacacgggaggtgtgctgagcgcagatgggcagatgcaagctgaggtggcctgttggagggtcctggaccttccagaaaagaggacatcagctgctcagggagggaaggtttgagatggattctggctggtgtggatcagcccatggtgtgtttgcaggcagggacaccttgaacagacatgggctgaggggagtttgtgtggagcgtggccagtgaaggctgggctggccggcagggtccgctggtcatgggaggcctggcctgcagcagcagggcccatcaaagacatggggatggatggctgatggacaagatggctgatggacagcgttttagaaggtcgcaggcttgtttaggctgaggccagggagggttagggtcctcagggaaggagagtaagctaggggagcctcctgcatagaagacttcctacctgaggccgtcccctaggagttcagccaccccgtggagagcctggcgctgactgtggaagaggtgatggacgtgcgccgtgtgctggtgaaggccgagatggaaaagtttttgcagaacaaggagctcttcagcagtctgaagaaggggaaggtgaggctgcctagacgtggggctacgctcttgcccgctgggtcaggggcgggtgccgagagggccagttcccaggactgtttgctcatgatctggttgggagccctgagggggtagcagggacagggcgggaccccagggagctttggacaaagcggggctctaaccagtctctcctgacagatttgctgctgctgccgggccaagttcccgctgttctcgtggccgcccagctgtctcttctgcaagaggtgagccttccctttagctgtcagttcacaagggaaggaggaggcgagaaacctcggggcagtaccgcccacagaacttcctgtgattccaggaatgttctagcatgttcgatggctgatgagtccacaagatatggttagtacgaatgaggagttaaattttaaattgtatttaaattaaattaaatttaaatagctaagcaactcccagtttcagccaagatggggtaataggcatcttccacagccaagaacaaacaggatgtgaaacaatggttttcaagacagcaggcaacaaaaaggaaacacaacggggcaagcctgccatcaccacagtcattgcctggagagtttctaggtcatgagccacagctgccggactccccagatggaggaggtcaggctgagaatccagggagaccacagcagctcgagtccgccgtgtagaactccagaggagagggctgcgccgagaaagcctcagagaaggtccccctctctgaaggaaatgactgaaggctgcagaacatttatcctaaagcagagattggcagactatagccacgggccaaatctggtcctcggcctgttttgcaagtaaaatctcactggacacagccacacccatttattactcgctcagccacgcctaaaaggtttattctctggccctttacacaaaaaatttaccttcccttgttctaaagatctgaagggacggtgctcaggggcaggaatgagtaacatcggtttccaccggccacaggcagaaatgtcataattcacagggcactaactggaatgcacacaaaggactcgcctcactaacgtggagtaagtagcccaaagtgattgttgctctaggcctgactgatacatcataaaagcaagacctgaaaggatcaaactgttcacaagtatcttaactgattctgagaacaaagctcaagaataagaattttttaaacatcaacaaaaaa

SEQ ID NO: 23 - DNA, 2304 bp, Homo sapiens
cgattctcttgcctcagcctcccgagtagctagaattacaggtgtgagatatgcacccagctaattttttgtgtcttttagtagaaacggggtttcaccatgttggccacgctggcctcgaactcctgacctcaagtgatccacccaccttcgcctcccaaagtgttgggatttcaggagtgatcccgcatgcccagccatcaataaatacttactaagtgcctactttgttcccaagagtgctgggaacttagcagtgaacaaaataaataccttccctcggggaccttgaactcaagtctagtcagggatcactctattaagagatcaagtcaacactcaattctcctacagactcagataggatagtattttaatttctcgttgatctgctccctcagaccctagaccatgggcactgcagatttttgcaccttttgtagaggcagggtttcaccactaccagagactttaccatcatttctatgtgaagggaaacagtgccctttcagtagacaacgttaaatcagccatcagacgtgggtcatggtgggtttgccgtgactgccacaaacacgcctcaccgaagtctgccaggggacgccataccctcccctagaaagtaagaaacagagaaaggctttctcctgccccggactgtctttctctcagctctaagaaatttctttacagctgttactttatcctggcctgtctcttgagtaagaaaactgctggaaagagtctgccattcactcagatcataatcagggagcctgctgtcactcaggaagggctttaaaaaattcttctgatttactgtgagtgcaaatctctgatattcctgcatctccccatccatcttattttgattttacacatagtgcgattttgaaaggaagcggtgtttttggagaggtagaaaaactctggaaaataaggcttatgacgttggccatcagcacggggctgctgtctgctgtgtgacatgctcaggggtgacgcgcctcccgaaagagacacttggtagagaaggcacgggcgcgaagcccggctgcgggagagctgggagcctgaatgtcgctggctgccgttcacagcaggctctctctgagcaccgtggggaggcagtgacacccgctggcctcgcagcgacactccggcagctgtcctgttttccagcctggacgtgataggtgtgtcttggaggacagtcagaggaagacaggcaagccatactggcctccctcgaggttataccctcgcttaggttaggttgcttctaacagacatcctccgcgggcgttgaggcagccagcttcactgtcacccagacaatttttctctcgctctgccaaccctgttcccctttcaagaatgtttaaactcttcattcaagcgatgagagggaaacacttgagctgcacactcaaggagatgtgggtttccattctggccttgcgatatattattggtgggaccgtgggtgagtcacttaacttctctagtcctcagttttcttatctgtaaagtgggctccagcatacggcttaactgaggtaacacacgttgttcatgtcagctgttgctttcatgccggctctgcctaggtctccccatggcaacaggataggagttctctgcctgtgcgtcagtttttcactagcgtgggaatgctgtgaggagggggcggaactcggtgtagcaagggtttctgtccgtatcttctattttttttttttttttttttttgagactgagtcttgctctgtcgctcaggctggagtgcagtggcgcgatctccgctcactgcaagctccgcttccagggttcacgccattctcctgcctcagcctcccaagtagctgggactacaggcgcccgccaccaagcccagctaattttttgtatttttagtagagacggggtttcaccgttttagccgggatggtctcgatctcctgacctcgtgatccgcccgcctcggcctcccaaagtgctgggattacaggcgtgactaccgcgcccggcccgtatcttctattaagaaccagcaaccacgggctgggcgtggtggctcacgcctgtaatcccagcacttagggaggccaaagtgggcggatcacgaggtcaggcgatccagaccatcctggataacacggtgaaaccccgtctctactaaaaatacaaaaaatttggcaggcgtggtggcgggcgcctgtagtcccagctactcgggaggctgagggaggagaatggcgtgaacctgggaggcggagcttgcagtgagccgagatggcacca

SEQ ID NO: 24 - DNA, 2470 bp, Homo sapiens
gtggaacacatcctccatatagccacactactcaaaattcactgtctttaagtctttactcaaatgcttctccgtgaagccatccctgagccctctttaaaattgcagccccccactcctgtactccttattgtctctcatttttaatttttgttattgtagttagaaccatctgacacatagcttttattccattggttttttgttatgtctttctttacaagaatttgaagtccatcaggccgggagttttgtttgttgtgtttgctgctatctcccagtgcctaaaattgcctggcatacagtaggcatttaataatctttgaatcagtgaaaaccagatggtggcttggcatttccacataggaatgagccaggtggaaatcatccaggatataagtagatcttgaagtgataaggaagggtcatcataatcatgtggggcccattttgccctttcttgtttcttttctctaggctcagcaacagcctcaccaaggactccatgaatatcaaagcccatatccacatgttgctagaggtgagagcagctcaccccactaccagactctgtgtttagggtggtgacctgaagaaggaagagagcgaaagaagggaaggaccatctttccctctaaactggagtcaagggagggaggtcagagcaagcctgggggcgtaacccagacccagtctttgttcaatctcttctgtcctctttttcaggggcttagagaactacaaggcctgcagaatttcccagagaagcctcaccattgacttcttccccccatcctcagacattaaagagcctgaatgcctttgagtcacatggcccttctttttccccataaaccctgctagttgccacgggggcctgttcctagggcacaaagttactgagagacccagagatccagtctctctgtggaacctccaaaatgccccagcagtcctgcctccagcctgttgcctggcagtatttgccagttgaccttatgcactgccctctcttctgtcatcttggcaacctgggccccccacctcaccctttcttccattccttttcctagacgccaccctttgaattgccatagagaatgggccaattcatggtggaggtttgttcattcccacaacaatcaaagggccctaaggtttacgctttcacacacccaatcattccccaggtaccccaaattacacccaaaccctaactcagccctaccttgtcttagcccctgcttgtaagtgttccagcttccaatgggcacagacctggatcccgctctccctagtcgggcccctattctaggttgagtccagccaccgccaatcaatgcagagccaggttcctcccctttttaactctggccgcagttcaaccctgccctctgaaagcatttcgtttctgccactcaatgctctttcgtgtgcctgacagccatcctgccctcctacctccgctgtgttctaaattcgtctttacccagctctatggtcttgtctaaccgtagagctgccctgcccgcctacgcggagcccagtccgacccactcccgccggctgctacgcccatttctatacaagccctgcttccgctgagcagcatggcgtgcgacaccgcccccttggtgttttggcaggggtctagaagtccctcgtccgccaatcagagaaaaacagggccacccacccccgtccttgggggctgtcttccatcaatcccatgtaagccaatcagtgtgaggcagacccccgcccccccgacacaggccccgagccttttcagttgctcacagtccgtcagtccttgagccaatcggcgtggagcaccgtgaaggccgaacgcgcctcctcgggactccaggggccgtgagcgttccatcatttccccttacgccaatcacggcacagctctgtagggaagggcccgtcccccaacccctcgaggccttgcggccgattaatagcgctttggccaatcagcgagcggcgggacattgggctcctcctcctcgggcccacgtgagctgtagggaaacgcaggggcggcttctaggtgctgccgccgccaccgccaccaccacctccaccgccgcctcggaacccaggcctggggggcggtggggccgcgtatggagcccccgccccccggagctgccaacattgccaacgccaccgccacgctacacacaggtgagctctgggcctggagggtggagggcccagtccgtgaccccacgtatccttcccgcccccgcgcagaggatgtggcttggccggtggcctgctggtgttcgactccccgccgccaccaccacggctggtggacctgcgtgtggcattgctcaagcccttcgtcccttatagtggatctgaccgtggcctaacctccccctcccgttgtataatggatcggtctgcgtgcttatgtttttccccacgccaacttagggtggactcgtcc

SEQ ID NO: 25 - DNA, 2470 bp, Homo sapiens
tccaaaaagctctgtaaaccaaaagtttgggggtaaactcatttggtagcaaattttgacctgaggctatttatagtctatattctgtattctttctacttagtatgaataagcatgtaagttttactgcatgtttgatttcagcatgttcccccagactctctgggggtgtttacgtatgccggtgggggaaagagaccaactctcaaatattatctcaaacagttggtttcactgtgcttgcttgggtagcacatataccaaaattggaatgacccctgcacagggatgaaatgcaaattcgtgaagcatactgtatttttcttagcacataccacctttggcaatattctttttttttttttgagagggagtcttgctctgtcgcccaggctggagtgcagaggcgcgatctcggctcactgcaagctccgcctcccgggttcacaccattctcctacctcagcctccccagtagctgggactacaggcgtgtgctaccacgccaggctaattttttgtatttttagtagaggcggggtttcactgtgttagccaggatggtctcgatctcctgacctcgtgatccgcccacctccgccccccccccgaagtgccgagtgctgggactacaggcgtgagccactgcgcccggcccccgccttttttttttagattgattttattacttgcctagcaaaggagaaccttctggcagaacagtctccaagaacaaggcaaacaactaattttacataggtttttaccaatgtacagctgttgattgtgactggtttccggcaatctggatttcacaatctggataaggggacaaacaattgtctgtcttccactatctttcttgaatttgaatagaacctttttattctcatagcctcttagctttctttcttttttttttgagacggagtttcgctcttgtcgcccaggctggagtgcagtggcgcgaccttggctcactgcaaacgctgcctcccaggttcaagttattctcctgcctcagcctcccaagtagctgggattacaggcgcatgccaccacgcccggctaatttttggatttttagtagagacgggggtttcaccatgttgactaggctggtcttcaacgcctgacctcaggtgatccgcccgcctcggcatcccaaagtgctgggattacaggcgtgagccactgcgcccggcctctcatagtctcttagctttctaaaatttgaaaaatcctgtaaagacacacctgggtcaaagggctcagataacggactgtggcccttaagtacttacgtcacaggttattgagaggatcgatttagttaccagatgtaaaatgctgggatcagtgcctggcaaaggaaaactttgtacagctgcaggctttcaccatacacaacagcatcgctaacgaatgctattacaatattcatttagcgtttaccaagtgcctactctatacaaatcttgagaatacaacgtgaaggtgaactgctgactaaagtttggtccctttcgctccgtctccttgcgaaaatgctctaacggcaggaggtcacgcgagcgctggacgcgtttctccccgcgagcccctttccgaggcctttcgggtccccccggttatccccgcccgggcggtgcgcgcccccgctgttcccgcttccgctccagagaggcagggctttccgagcctgctagccccgcggccgcaactaaccccgggtcggagtgttccggcccggccagccccgcggcgtgagggaaggggagctcagcagttccccgcgcggggcccaggcgtcggcggcagggcgggcccctcaccgccagcgtgccagccccgcccctacccaccagtgtgccagccccgcccttccccacgtcgccgcgcgcccgggggcggggcctggcgcgcaccgcccgcgcacggcgaggcgcctgttgattggccactggggcccgggttcctccggcggagcgcgcctccccccagatttcccgccagcaggagccgcgcggtagatgcggtgcttttaggagctccgtccgacagaacggttgggccttgccggctgtcggtatgtcgcgacagagcaccctgtacagcttcttccccaagtctccggcgctgagtgatgccaacaaggcctcggccagggcctcacgcgaaggcggccgtgccgccgctgcccccggggcctctccttccccaggcggggatgcggcctggagcgaggctgggcctgggcccaggcccttggcgcgctccgcgtcaccgcccaaggcgaagaacctcaacggagggctgcggagatcggtagcgcctgctgcccccaccaggtagcggggtgggggtggggtcgaaggcgggggcatagcggcggggcgcttggaacccggcgaggggaggctcgcacagggggttgggggggtgcacggcctggccctgggctcggagg

SEQ ID NO: 26 - DNA, 2470 bp, Homo sapiens
atatattatatcgtgtatgtaatgtataagtatttatttcgtttgcttggggttttgtttgcttttgctgagtccgacccctctacctgccgcctggcccttgcctcacgctccagtgccactgagatcaaggagagaacgaatttgccgctgactgggcagagcgagcgcgtggatcgcggccaccgcccgttcatcacccgcgcgcatctgggctggcaccgggcgaagaatcgtgcgggtctgggacctgggggcccagagggagcgagctcctgcgcgggcgctcggtccgcaggtttcgcaggctcaggggcgtgcctcgttctcacccccactccggaccccggtcctcttccctagacagcggccccctccacccctggctcccgcaggccgctagtagtccgcgccaggccccgccggcgcctctagggccccccagatcgcgcagaccctgacatccccgcctggccctgggttctgggagctgagagccggccagggtcctgctcgtacctccgggcgcccagcctcgggtctgctccccgcggacgccccaacctccccggccgaatggatggtggtgcgcgcgcgtcctactccggcggtgccggccttttctgttgccaaaactagacccaaacctctgcatgggattcgtctttgggtccccaccccgtgcgcccagcaaacagtgggtgagccatgaagatgtgcgagtcagccggaccctccccgtcaggcgcggacccgctgcggccagagaacccagtctgcgccagcccggctcgctcgcgaagccacgggcttcactgacgcgactttccaagacgtgggggtcaccatgggcagaggacatcggttcggagccagatcacgggccccataagcatcagaccataagcagcgccgccactgagagccgctcggaactcgcccagcatgtcgggtcccctagccagggcctggtgtacgtggtcgagggccctggaagccccgatggcctaggaggagcaggcgggcggggcggcgggtgtcgctggccggtagagagcttcggcctgacctagcgcaggtctggtgcgcgcagagaacaactccaagcgcaccgacgcccgcgagctccttccaaacaccgaacgggatccagagcccgagcccacaggcggcggccgggggagggagcagggtgctggccgccgcccgggagtgttcgcgtcctgggtgacccctggaaggacgtggggcccaaactccggctggggttgggagagcagcccccagaggctctccgcgggatcctctgccgggcgggaccgtggctccacaggagaagtgggtggcaagccctgcttggcggaaagcagccgttcccctcctcctgggcctggggcggcgcccctcacccctgttccccgcccctcacccctgttccccgccggccacatcccctgccccttggattccaagcgccccgcgcgccgaggagcccagcgctagtggcggcggccaggagagacccgggtgtcaggaaagatgggccgtctgggggacagcagggagtccgggggaaacgcaggcgtcgggcacagagtcggcaccggcgtccccagctctgccgaagatcgcggtcgggtctggcccgcgggaggggccctggcgccggacctgcttcggccctgcgtgggcggcctcgccgggctctgcaggagcgacgcgcgccaaaaggcggcgggaaggaggcggggcagagcgcgcccgggaccccgacttggacgcggccagctggagaggcggagcgccgggaggagaccttggccccgccgcgactcggtggcccgcgctgccttcccgcgcgccgggctaaaaaggcgctaacgcccgcggccgcctactccccgcggcgcctcccctccccgcgcccatataacccgcctaggggccgggcagcccgccctgcctccccgcccgcgcacccgcccggaggctcgcgcgcccgcgaaggggacgcagcgaaaccggggcccgcgccaggccagccgggacggacgccgatgcccggggctgcgacggctgcaggtaggaggcccagggccggggggcggttcggctccgcgggcgggggctggagcgcagcgctgggcaggcacctgggctcgcagctccgaagctgggaggtgaggggagagcgatcggggacgagctgggacaaggcgacacaggggctccctcggagttggatcggcccctgggacttggcgctcgcgagaggctggagcggccagagtctagcctgcgaggagacgcgggtcctgccctcagcgccggccgcctttggcgccaaagacagccccgcaggggttccgggagggccctcctcctgctgtcccctctccaccccgggctccgagggccgttgggagggtaaccccgggaagaggccggggtgcggggcgcgggtgcaggt

SEQ ID NO: 27 - DNA, 2470 bp, Homo sapiens
aaaattgaacatctgagaacactggacccacattcctgagggcaacaatctgctagagttgagcagctgttccttttagttatggcatggatattccaatttgccattttccctatcattccccattgtcttacacaaggccagtctcactcatttgctttacttgtctggcctctgtagccatttgaatctgcaaacactatctagacctttcctgtcttccatcaaagcttactttgttctgtcccaagtccttcatcagtgtttcaaagcaagagccaggtaatctgatcaaatataggtcctttaacatgtgctttctggagacagcatcttaacagaaagagatgactctgcaggtagaaattacaggcaccactggattacaatcaggatggcaactgtctgttctactttctctgttatcttgacgtagccatacctcactgttctaaagcagaccaaaggaactggttctatggtagaacaatggacgctggtcttatgtatgaaatcttctcaagctgcacttttatagatcaccctagttccaaaagatccaaagctaccacgggctcctctgacccccccatttcctcggaggcttcaggatatccggcctgacggcatttcccctcacctgctttcggggcccgttttgcgctgggcagttgcgcccaaggagcgcgcgcatccagcatgagctcatttctcatgggcgtttccagaggcccggccgggccgcgcacaccaagcgcagcaagcctctgtatcaatggcccccgcggctgggcggggcgcggccgcccaaaggcgctgcctttctggaagctttgttcccattttagcgtctgagagcttgcagccggctgggaaggcccccttggtccgtctggccctttcggggaagaggccaacactcggcacacgcgatccacggcagaggggagccttgggcgcgcagaattggctgcgccccgccgagagcctcctgtgggtggggagagcccctccacccctctgctcgcttgagcgctcagagcccagggccgccgaccgcagcactttccgatttgctgcaccgagggcccgcggtccctgtgtgcggtttccaccgttgttggaggcggccgcaggcgaaccgtcgggtcgtcagccacgacccgagtcaggcatctccccgctcctgggaccggggccgaaggccaatcacactgcagctaggtcttgcgattggacggcagtgagagccgattggccgccgccgcgagtttcgggctccctccctctcccttttgccccaactccagcgcctaagcttcaggccaatgagacagcgctttatagacgccctcccttcgctttcttctccccaccttggagagggaggggaagtcctgactggccagactgtcctcggaagcccccttctcttcaccaatcaccgaaggaggtacgctcccagcggagttttccagccaatcacaaagcggcggcggcgcccagccgtgcagtttcaccagcgtctctgggtttcaccgtcctcaactcttcaagcctcttcgtaagggccggcgactctgattggccactgttgccattgtcgaatgtctcctccagccagccaccgaacaaggcgaattcaccctttccgttcggctaccttcggcattttccgctctttgggcgtggcttcccagcgtcactttctaattggtttctcaggctgatcggctttttccgggaggagccgcaaacaaacgacgtccgtgattggctccgttcgggcttcggctcccagccgaagcgggcgagcgtggggctcggccggcgattcccagacgcctgttacgcgggcggcggggcgctgggcggtgtaaggctgggtgggggaggaaggaggtggaggacgagtaggaggggggaggaggagtggggaagtgcaaggcggctgcgcagacagcgctcctcacacagagcagctcctgacccgggcgaatgcgggcttgtgccgccgccgccgccgccgccgcccgggccaagtgacaaaggaaggaaggaagcgaggaggagccggccccgcagccgctgacagggctctgggctggggcaaagcgcggacacttcctgagcgggcaccgagcagagccgaggggcgggagggcggccgagctgttgccgcggacgggggagggggccccgagggacggaagcggttgccgggttcccatgtccccggcgaatggggaacagtcgaggagccgctgcctggggtctgaagggagctgcctccgccaccgccatggccgctggatccagccgccgcctgcagctgctcctggcgcaatgaggagaggagccgccgccaccgccaccgcccgcctctgactgactcgcgactccgccgccctctagttcgccgggcccctgccgtcagcccgccggatcccgcggcttgccggagctgcag

SEQ ID NO: 28 - DNA, 2470 bp, Homo sapiens
ctttgtttttatgtttagtctattgaagcttgctctcaggccactggagctgagctttctgaacacttctggttcagagtgctgcagatttatgaattgttgtttgctgaaataaggtgtaaagtttattttgtctaaagtttttaacaggagtgataattcaggcaaaatgttcacataatagtgggaaatcaaaagcttgcgatacagaaaagtgatatatatttgtaaactcctttaacaaaggcatcgtagcataagcatgactgtagagccagactgtcaatgttcaaattttttctgggccttaatttctttatctgaaaatcgttaacagtggaacctagttgatagggttgttgtggagcaagcgttcttaatctggagtccatgaaatttcagcatctgtgaactttgtattgaaaaaatcgtaactttatgtctattaacctcacaacagtttcgtttctttgaattataaaggcaggcaacaaaccacagtagtattatcagtacctacaactttgtttcctacagaaattattttcatactcagtaagttgttgcagatatcttgaacaattatacgtatatattccttaagtattatatatataatatttttatattctgtatatatttttggagacagggttttgctctgtctcccaggctggagtgctgtagcatgatcggaactcactgtaacctcaaactcctgggctctagtgatccttccagcctcagtcttggaatagctaggactacaagtactccccaccatacccagctgttaatttttttttttttcgtaaagacaaggtctcactatcttgcccaggctgctctccaactcttggacacaagcctcctgcataggtctcccaaagcattgggtttacaggtgtgagccaccgtgcctggctaatactatgtatttaatttcatgcgtttagaaatatgtgctattttaagaaggcgtctacaggttttatcacattaccaaaggtgttcatggcacaagtgaagaaatctctagatactagagtaataaaaaccatgatgcattagaacggatcaggcccatatcaaacgttcaacatacagtctgctgctatggttctttttttttttttttttttttttttgagacagagtctcattctgtctcccaggctggagtgcagtggagtgatctcggctcactgcaacctctgcctcccgggtttatgccattctcctgcctcagcctcccaagtagaggaactgcaaggcgctccaccatgcccggctactttttgtatttttagtagaaatggggtttccccatgttacggcaggctggtcttgaactcctgacctcaggtgagccacctgcctcagcctcccaaagtgctgggattacaggcatgagccaccatgtccagtctgctatggttcttaaaatattcatagaatagaaattgaagtaagtctattcgtttttatattaaaagtagctagtacggtgctctgtacttatgcactccatggatgctgaatgagtcattgaatgaagtggagtctaggttgtgcctcaggccttccagtggggctggaaggaacagttgtgaagttgtggggcggcttctgtgcatcgggggactctggagttagatggtttcccagggctctgaaggagaagagctgtgttcctaataatgatctcaatgggaatagagattgctggggaccgcaggggccaggttgtcattccccaaagcttccccttcatcatccaagaaggcattcaggtctttctgtgctaggccccaggtaaagtgctggactacccagtaattgggttcagtagcaggatggcctcagattgaggtcccagggccaaaggaccactcctctcctcagcgctggtccgggaaaggcaagctccgggcgggagcgcacgccgcgcccccgaagcctggctccctcgccacgcccacttcctgcccccatcccgcgcctttccaggtcttctcccggtgaaccggatgctctgtcagtctcctcctctgcgtcctcggccgcggcccgggtccctcgcaaagccgctgccatcccggagggcccagccagcgggctcccggaggctggccgggcaggcgtggtgcgcggtaggagctgggcgcgcacggctaccgcgcgtggaggagacactgccctgccgcgatgggggcccggggcgctccttcacgccgtaggcaagcggggcggcggctgcggtacctgcccaccgggagctttcccttccttctcctgctgctgctgctctgcatccagctcgggggaggacagaagaaaaaggaggtagaatggatccccttggccttcccctgtgggcgggggcgggccagggtgggccgcgttgccaggcagccctgccgtgttgctaggcagcctggtcgccggcgtgggcgatgccggcgctggg

SEQ ID NO: 29 - DNA, 2470 bp, Homo sapiens
agctgctctgtctagaagccgattttctgatgcctccaacgtctggtctaattgatctgttttaatggagtcttcgtcggtgaggagcgagatgccaccgactagaatgctgggatctgctgcttaattgccaggagtgagagacactgagattcagaaatctttggaggtgggaggggagagggacagtctcggacggaggcggagatgtaagataaagggatggatttcacacaggaaaaaaaaaaagatttcgttgaggcactgaggtgctgcacgatcacatctctcaaaggagaagttaaaaagcaaggaagtgggaggaggttggaggttaaagtacttaaaaggattactcgggtacaatttgtttttctgctggtgtctgcaaaggatagatagtcccgttttcaaagtatatgaatgcctcttttaagtgattgggaatggacactaattgcctgttaaatgttatcaaatgctctcctaaattcaggggacacagaaagaggggcacaaaaggagaatttaaatagaaaaagggaggatccggaggcttttgaaagcggggggagaagaaggaggagggataacagagaggaatagagaaggagagcggagagaagataaacaaaaacaaaaacaggaatcactgaataatcacacaccaaaaagaaagctcttccctatggggcatccaaaacactgagactgcaatagtgaccccggtcatggaagaaagatgttcctctccacccttgtccccgaaagctcttggtcccgttactggcgactaaaattccattaggctaaagagtgtgtctaactgcctgaagaatgcagcagacggaaggcgggtcccgctatgccgtttgcccttcccgctggagagaatgaaagaaacgcgcagagccagagactcctgccgagttagaccttctctcgtcgccccaggtcaccggccatccggcaaagacccgagtaaggaacgcagggtcactgcctgggccaacaaatggagcccgctctccccttcccggacgccgctgcccggccgatgctcccggcaacccacccgcggcgtatgcagaggagcctttctctttctctcagaccacttgtcccgaccaatctgaccttccaaacacatctgaccgcacctcccaggtggacacactaataggctacgggctggagaggagcgggtgatgaggagagggattcaaacctgcgaacgcttgggctgggtcggagctgcggggggcctgggaggagagaggggagaagagagaaggaaggagagcgcctgccgggatggctgagctgcctcggcgagcagccttggggttgcacgctcttgtgggagatgctgctgttgcttccaggtcggcaagagcggttctaacaccatcgcctctcaccctctttcctgtaaatccctagagaaacgtccctggcctctccgccgcgacattcccagcctgcatccccctacagcctaggcggcgcgctcccgcacgctggagcgccggtcgccagcaggacgccctctcccgcgccgactcgcccctctctgccctgctgctgctgctcctctgacacctccgcccccaccatctccagctcggagagacgccacccagccgcggcccgcactcgcggcccggggtcacgcgcggaagaggggcgctagtccggaccccgccttcggtagggggcgtcctggagcggagagtgaggcgaatggtatatgagtgtgcgggtagcccaccctgaagcccgagcttctcatttgagccatccccgcctagccccactcgggccagcgcctggcgagcgagcccatctgtggcttccgcggccgcctcctccttgcatccttgcacctcctcgtcgacccctccctcccgggacctgcatcctgctccaccaatcagagcccgactgcctcttcccacgtgaccccgggcgggctgaggacctgctgcttcccaaacgccagagggatgcgggcggcagagctcgagaggcggctgccgggctgcggggcgccttgactctccctccaccctgcctcctcgggctccactcgtctgcccctggactcccgtctcctcctgtcctccggcttcccagagctccctccttatggcagcagcttcccgcgtctccggcgcagcttctcagcggacgaccctctcgctccggggctgagcccagtccctggatgttgctgaaactctcgagatcatgcgcgggtttggctgctgcttccccgccgggtgccactgccaccgccgccgcctctgctgccgccgtccgcgggatgctcagtagcccgctgcccggcccccgcgatcctgtgttcctcggaagccgtttgctgctgcagagttgcacgaactagtcatggtgctgtgggagtccccgcggcagtgcagcagctggacactttgcgagggcttttgct

SEQ ID NO: 30 - DNA, 2470 bp, Homo sapiens
acatttaaattgcatatttggcttgtaatatattacatatttaaaagaattactatttttctgaataccattaatactaataatagcatcacagtgactaagagtggacttaaataaaggctggcttgaaactcaggtctgccatttattagcaagcttctaaaaattctgagcccttagttttctcacatgtgaaatggagaaaataaatctgcaaaattaattaaatctgtccattcatatttttctctccagtgtatattaactggcattcctcgttaggccagaatgtgctctcaaccatgctccaaatccgctttgtgccaaccccactgccagaaccctttctaccttgagaaccagaaaaggaaacattatgcctggcaatgcctacaccctccaaaataaatctgcaggaaagaacacccagtaagtgatgagagcagcaacgactgcctttatcattttaaatttacaacaccaccttttctagagcctcttaagcattgtagataattccccactcattaaaaaataaattgtaaccataagtattcagggttgatactgcttttgaattagacagtgctcatatcagttgcataagaccaacctaaagtagaggatgaaatcttttttctgaacctttttcagaacgtaacttagtgaatatattaaaactaaactttctttgaatgggagtaatttctacggattaatctgtaatctcttagaccacacctaaggtaatgtagaggttgttgtatcataggctttgtgattagagaccactggatttgtctttggaaaagtcactcatgattctttgggctttggtttcctcatcttttataccggcttaataatgaccaccgtagagttgtcatggaagttaaatgaactcatgtaccataagtgaccaatacaatgattgacactcagtgatttatcaataaattaaaacatttattatcaatatgacagagaaggtgccgctaaaatagacaataggtttttggaagaggtgattaaatggatgcaaaatttatggattgtttattccgtctacctttgctgtgtcccctggttgtggcatacacacgtgtgggtataaaatcgtaaatcctatgtagtcgcgtagtgcatgcgcagaaggcttagacacgaaatgtcatttcagcaatgtgcctagagaagctctgacgccgccttggaagtaagtcgttgctgcctgacctttgggcgtctgggacggatgcctatacctgcacccagcagcactggaaggggcccaggcccttcgcagcacagcctatccccagaccgcttagtccttcataacatatatctccacggaaaagggtatttcctcccgtcagaaaaagcgccccagtctggtctgggttggtttttatttcacgttgttgcaagtaggcgaagtcccttctgtctcctcccttggggtaagtggaaaggagtccggcagggggcccgcagtggcctgcacaggggaactgggtagcgagagagttccaggcaattccgggggctgccccacagaagcaggtggggatcgacagtggctctccggcccagggaggagagcgcggtcgcgggtccctcccctcagcctggaggctgcagccgctcgagtcggcccgggtgggggcggggtgggggcggcgcggagggcacggagattacggcggcgccacccgggacatccagggccccgaggccctgggcggtccccacgcgagatcgcaaaccatgacaataggcagtcacccgaggtcaaataaaaacggagtgggtcccccgcgcgccgccgccccccgcgtccctggcggcctcccccgaggcccccggcggcctcacgagcccgcagtagccggtggcgacgtcgcccccgccccacctccctgcgcaagtgcgaggctgccggcagcgcggcgcacgctccggccgttcccggcttccgcgcaaaacttccatcctgtccacgtgaagttgtcgctgccttagagagggggaaagagctgcgggaaaagccggggagtgacgactgcggcggctgggcgcgctctctcattttcttttcttctcctttcccccctgtcgcagtccggagttttggctcctctcctttcctcctccccctcggagccggcttctccctccgccccgcttctcccccgcttgtgtacgctatttgttgtggggtggccgaaggggatgtcctgttttcaccagaggcacagcgcgaaggggaaacttcgacactggaaggaacgagaataaatacttaattacggacgcactgaaccgcggctgggacagacacttcgggaacccgaggcggaccgggcgacgaggtgagtgaccccttcttccaacccccgccccagggctcccgggggagcctgagttgagagaacccccaaactttccgggaaagtgcgcgaggctc

SEQ ID NO: 31 - DNA, 947 bp, Homo sapiens
ctgctgctctcaggggccctggccctgaccgatacttgggcgggtgagtgcggggtccagagagaaacggcctctgtggggaggagtgaggggcccgcccggtgggggcgcaggactcagggagccgcgcccggaggagggtctggcgggtctcagcccctcctcgcccccaggctcccactccttgaggtatttcagcaccgctgtgtcgcggcccggccgcggggagccccgctacatcgccgtggagtacgtagacgacacgcaattcctgcggttcgacagcgacgccgcgattccgaggatggagccgcgggagccgtgggtggagcaagaggggccgcagtattgggagtggaccacagggtacgccaaggccaacgcacagactgaccgagtggccctgaggaacctgctccgccgctacaaccagagcgaggctggtgagtgaacccggccgggggcgcaggtcacgaccaccccccatccgccacggaccgcccgggtccctcagagtctccggatccgaaatctaccccgaggcagcgggacccgcccagaccctccacccgggagagtcccaggcgcctttacccaggttcattttcagtttaggccaaaatccccgcgggttgggcggggagggggcggggctagctgggcggggctgactgcggggaccggctagggtctcacaccctccagggaatgaatggctgcgacatggggcccgacggacgcctcctccgcgggtatcaccagcacgcgtacgacggcaaggattacatctccctgaacgaggacctgcgctcctggaccgcggcggacaccgtggctcagatcacccagcgcttctatgaggcagaggaatatgcagaggagttcaggacctacctggagggcgagtgcctggagttgctccgcagatacttggagaatgggaagga

SEQ ID NO: 32 - DNA, 3120 bp, Homo sapiens
aactttaagtttaggccgggcacagtggctcacgcatgtaatcccagtacttggagggaccgaggtgggcggatcacaaggtcaggagattgagaccatcctggccagcatggtgaaaccccgtctctactaaaaatacaaaacttagctgggcatgatggcacgtgcctgtagtcccagctacttgggaggctgaggcaggagaatcgcttgaacccgggaggtggaggttgcagtgagcggagattgcaccactgcactcgcctggtgacagagcaagactctatctcaaaaaacaaacaaagaaaacttgaagtatagtatccttttaaattttaaatagataatagaaactggtttccccccatttaaaccagaatttaagtttaactttatatattcttgacagtttggattttgtccttcaacctcataaaattgggaatttaagcatcacctggttcgatttaaatgcaatgtagaatttgcattaaaatactacattaaagcctcagatttgtagtagctaacagcacttctatgtatgtgtcagggactgctctaaatacttcatatatattaactcctctattctgtacttctgttcccgttttatacagcaggaaattgaaacactgagaggttaagtaactaaagttacagagctagagtgacaggagtaaagcttcaactcaggcaacccagacttccagagttctgatctccactactaagctgctagcatagcttttctggtaactatttttaattcaaatataattcgagtgatctatctaacaagtcatcactctgacaactcagtgacttgtaatgtaaaattattcattgtaattcatttaatattattgtttctctgtgctgcaaaaatcatagcaatcgagatgtaatttattactctccctcccacctccggcatcttgtgctaatccttctgccctgcggacctcccccgactctttactatgcgtgtcaactgccatcaacttccttgcttgctggggactggggccgcgagggcatacccccgaggggtacggggctagggctaggcaggctgtgcggttgggcggggccctgtgccccactgcggagtgcgggtcgggaagcggagagagaagcagctgtgtaatccgctggatgcggaccagggcgctccccattcccgtcgggagcccgccgattggctgggtgtgggcgcacgtgaccgacatgtggctgtattggtgcagcccgccagggtgtcactggagacagaatggaggtgctgccggactcggaaatggggtaggtgctggagccaccatggccaggcttgctgcggggggaggggggaaggtggttttccctcgcactgtcttaaaccgatggcctttccttggcacagggtccactgcagcatgccaaacgaggaggcaggggcgtcgtccccccgccccccactgcagcactggagatggatttcctgtacttcggatccagggtttttgacagaagaggaagaagggggaggggtagaagtgttaaggggagtctgctgagaaaagctgtttttgaagccagaaggggtttttgtttttataatgccatttgacagagtggaataacagtatctaaggaaacgggtagaggacaacaaagaatggagcatattcatggcgaggagcaaaagctctaccccattgaaaggcttcttttcctccctggcgacaaggacacatgcattggtggccaaaagagagaggagacaaaaccgctgcagatggctgatgtgaatctagtggaaagagctactggggatgagagaaagaggaggaggcaggtactgcagagcgtgagtggtggtgttggttggtgaaatactggtcaccagtagtgtgcctgcttttgtaaaacatctaagtaaactccctgtgaacagggtggcaaacagataccagtgtctttgttagttacaaaatgcagtggtagtggctttttgcggacgactgcagcagtgctttttctccctctgttaggccgaaaagacaactgcagaggaataagaaaccttgcagcaaatgctggggtagaagcccatttacaagaagccatagtttataaatgcagcctgaacagcagaaaaaaaattactgttttttaaagtaggaataatgtcaggctatgaatgttttgtcattggaatgtattggacactttgattctacatcacgaaagtgatgctcaaattctttgatttaacataaatcctatacgaaatcttaataaattatgtatgaaacagtggatcttttcttttgttagtgaagcttttatgccattaattaggtcattcaagagcaaaccactttacaacgtaaattactttgtcaaaaattatggtgaacaaatttttgtaggcctaatatttaagacctatagttaagtaattttatatttctctttggttgcttttagataacactgaataaatatttaagatattaattcagtgtgcaaatattttaaattaaagcaacatggcttttcttctagatgtatttctgtttagtgagtactcatgagatatactcttgatataaagtgtttttcattgagcttttttttcctttacctaaatgtaaaagcctatctttatgcatacttatagtagccagcctgccacacctccccactccctgaacaaggatggcagtggctttgtaaagccctccagggtcagtgacagtgtctcttaaataatgtttatgtaatagaaagtcttaagatgacctattatattgtttcagtaatattttcaagataatgcggaattgggctggcttagataaataagactacataagtttttcactgataaatttaaatagttctttaaaaaattatttctgctttaagaattacttgatcatggatatcagggttaatagtacttaggagccgggcgtggtggcccatgcctgtaatacaagctaaacaggaggctgagggaagctgaggcaggaggatcacttgagccttggcgttcaagaccagcctgggcaaccaagcaagaccctatctcaaaaaaaagtacttagagtctcttttttaaaatctgat

SEQ ID NO: 33 - DNA, 2501 bp, Homo sapiens
gtgttctagctcctgaatccatgctgttcgtcactacactgtactgcctgtggatgacttacttgtccctgtagtttcatctgaagaattcctcctccttttcctttgaggcctgcctcaaatatcacttcccctgtgaagactgcctggtgttctccaggagagagtgtgactcccttctctaggaatggtagcaccccaaacacacacattttgcagcatatttcaccttgcatggtaatggcctgcttgtgagttttattccgtaccagagggtgagggctctgaagatagcgccaggtcttatttacctcgataccccacaacactcattacatgtctgatgaatgaatgcatagggggatggctgggtgcatttctctcaacttttcaatttcttgaaataaataacaaaatcttaccttccctcagaagtcctggcatggttcctttcatcttgccacagccactgataatcactttcattttctgtgtaactcaccaggcaagaagtccatgcagatttacttttagtagttcacatgacaaataaatactgcgtttgatttccaaacattaaaccatagtatattatagatagatatagagttatcattcaaagtatgatatttcaatctcaaaaggcttcccctgaagaatattacaaactcttcctctctttaagatctgctgggtaggaaagatgggagaaaatgaattaatgtttacacagaaaggaggataatgggggcaaaaataatagatgaacgtatgggtggatgagagaatggataaaatgataggtggatatgttgatcttggacagatgggaaatgagtggatatatcaataaacagatatgtgggtggatgggtggagaagaggatggtggatggttgtggttttatgaagagatgtgaaaaaggaagtgtggaatgatggatgagaagttgtatgggaagatgaatagaagaataggtggttgaataaattaaaaggtgtgtggttggatgaatgaatgagtgggatgatagatggacctaagtggttagtggatggacaggaggatggatggatgtgagagccccagaaggacataaggaaagatgggtggatagatggatgggcggatggaaggatatttaggaggatgaatgagcatgtgtgtggagagaggtgcccattcacactggcttgaacacatgggttagctgagccaaatgccagccctatgacaggccatcagtagctttccctgagctgttctgccaagaagctaaaattcattcaagccatgtggacttgttattgaggggaaaaagaatgagctctccctctttccacttggaagattcaccaactccccacccctcactccccactgtgggcacggaggcactgcgccacccagggcaagacctcgccctctctccagctcctctcccaggatatccaacatcctgtgaaacccagagatcttgctccagccggattcagagaaatttagcgggaaaggagaggccaaaggctgaacccaatggtgcaaggttttacggttcggtcatcctctgtcctgacgccgcggggccagcgggagaagaaagccagtgcgtctctgggcgcaggggccagtggggctcggaggcacaggcaccccgcgacactccaggttccccgacccacgtccctggcagccccgattatttacagcctcagcagagcacggggcgggggcagaggggcccgcccgggagggctgctacttcttaaaacctctgcgggctgcttagtcacagccccccttgcttgggtgtgtccttcgctcgctccctccctccgtcttaggtcactgttttcaacctcgaataaaaactgcagccaacttccgaggcagcctcattgcccagcggaccccagcctctgccaggttcggtccgccatcctcgtcccgtcctccgccggcccctgccccgcgcccagggatcctccagctcctttcgcccgcgccctccgttcgctccggacaccatggacaagttttggtggcacgcagcctggggactctgcctcgtgccgctgagcctggcgcagatcggtgagtgcccgccgcagcctgggcagcaagatgggtgcggggtgctcagcgcggacccggcggcagcccctccggctgagtcggccctgggggactggagtcaagtgagctgtctgcgaagtgcattgggctccggaaagcagggctgggatttgcgctaaaccgttggagaatgtgtctgtggaagcaccatttggttgaaagaaaaagagaaagagaagaaagtttgttgggcaggctgccggcgcgcagttttgggcgaggtcgctagagctgcagcacatggcagaaagtaaccgttctcccggatgcgcacagtcgttgtctggactaacaggctcctgtgcccaagggctcgccaagccccaccgggctgtgtctaggcagggcagagctgggcggggca

SEQ ID NO: 34 - DNA, 2501 bp, Homo sapiens
agatttactcaaatttaagaatgagaatacaaatccacatcttgaagtgtttcacagaaaggtctatcttaatgtctggagtatatatttcaatgaacattcattttattttatttctctccattcctgaatcaagcaatcttgaatctaaagttgctatgattagcactgaaaagaccactggactattaattgtgtgactttgggacagtaactttctgcaccttagtttgtttacatgttatacatgaaggttgaagtctgattctgctctgtgactatcattctaaacatctgatgaaatcaaatttcagtgtttggaatggtagtacaataaatttactaagaataaataattcactgcaaaaacacattgatttccaaatgatgtaactgacagttatattactgcagagggctgataaataacaaaagaaatgaaagatgcacatggtgagaactgaaattatcctgacaagtcttctacctgtttatcacttaaaatcaatgaccatgctgaatgcctacaaattacaaaatataaaagaaatcttataaatgcgcatgtacaggagtctaagttactaaaagttttaaagcataagtttaaaccaaactaatcaaagaagttgagaggaaaaattggctttcatctttaatcactactgttttgaggtcctatgtttaatataattttctaagtagaggcttcagagagaagagttgtgaggatactttcatatttgtgtagaaggaaaagtttgccatccattctagtatccctagtgttatactgatgtgcaccttggatttattttgttcctattgtataaactcatacttgacttcaaagaaaaggaaaatccaaagtccctcttttctaaggggacagaaatcctttgtgtcaactgtttgacccttttctctgtaaggtcctattggaaatcttttgtaacacaatgcaggggactcttccatgtgttgatgctgtttacacagtggggtgggcctgactgaagaaaaaaaatcgcatatacgcatgaaagattatggtcttatttccggaaagcatgaaaggtgattgatacttccaagaagtccctgttactcaggaaaattatcaaatattctactcagagatacttggaaagactgaaggaaaggaagaacgaagaaagcagaatctagacttatgtggggagagatttgtggcagaggaaaagtattctctttgaatccgacaagggatttgcctgggggaatttcctgtccagccttttattaccagggtcttttgaagccgggctccccattgggcagttccctgggagtgcagtggggaattcttacactttccctctaggtccccgaaggatctcgttttctcagtgtctctttcaggttggcaggagccttgagcctgacacttccctttgatgggacaggcaagctctgtgggcgcgtaaacacgctgtaaccaagttctttgctgattttacagttttgtgtgctcccgagaagaagtgatcgtactcaattgtctattgctggcctgccccctaagagcctgggggctcctttcccctaacccagaactagctgcacggggggcggggaaatgggggtggggaaggagtgggagggcagtggtttccgcgagcagagcgatgttactgagtgagtccctgaatggggagcgctgctgtccccaagccgattggtacttcttgtcaggaagaaacgccaagaggtgggagtgcctggggagggaggcaggcggtccctaccgcaggcgcggggagctgcctttccgcccctccgcctgctttccaagcctggactcttaggagtggctgaagctgcggagcgcttttggagcctgtgaatgaaccctcctcctctccctcctccttcttctcgctgagtctcctcctcggctctgacggtacagtgatataatgatgatgggtgtcacaacccgcatttgaacttgcaggcgagctgccccgagcctttctggggaagaactccaggcgtgcggacgcaacagccgagaacattaggtgttgtggacaggagctgggaccaagatcttcggccagccccgcatcctcccgcatcttccagcaccgtcccgcaccctccgcatccttccccgggccaccacgcttcctatgtgacccgcctgggcaacgccgaacccagtcgcgcagcgctgcagtgaattttccccccaaactgcaataagccgccttccaaggtaatcacgtttcttttgttccccccttaaaaaacaaaaacaaaaaacttatagaaaaaaacccgcgagcttagaaaaaagaagcaattggtagaaggctttaattaaggcaaagagctgtaaggcgaagttaagaaaatgtaggcacttaaaaaatgcaggtaactttcataagggcttttggggagaggcatacagagggaccttggtgttgaaaaagattcagacaaaagaaacccag

SEQ ID NO: 35 - DNA, 3000 bp, Homo sapiens
acatttaaattgcatatttggcttgtaatatattacatatttaaaagaattactatttttctgaataccattaatactaataatagcatcacagtgactaagagtggacttaaataaaggctggcttgaaactcaggtctgccatttattagcaagcttctaaaaattctgagcccttagttttctcacatgtgaaatggagaaaataaatctgcaaaattaattaaatctgtccattcatatttttctctccagtgtatattaactggcattcctcgttaggccagaatgtgctctcaaccatgctccaaatccgctttgtgccaaccccactgccagaaccctttctaccttgagaaccagaaaaggaaacattatgcctggcaatgcctacaccctccaaaataaatctgcaggaaagaacacccagtaagtgatgagagcagcaacgactgcctttatcattttaaatttacaacaccaccttttctagagcctcttaagcattgtagataattccccactcattaaaaaataaattgtaaccataagtattcagggttgatactgcttttgaattagacagtgctcatatcagttgcataagaccaacctaaagtagaggatgaaatcttttttctgaacctttttcagaacgtaacttagtgaatatattaaaactaaactttctttgaatgggagtaatttctacggattaatctgtaatctcttagaccacacctaaggtaatgtagaggttgttgtatcataggctttgtgattagagaccactggatttgtctttggaaaagtcactcatgattctttgggctttggtttcctcatcttttataccggcttaataatgaccaccgtagagttgtcatggaagttaaatgaactcatgtaccataagtgaccaatacaatgattgacactcagtgatttatcaataaattaaaacatttattatcaatatgacagagaaggtgccgctaaaatagacaataggtttttggaagaggtgattaaatggatgcaaaatttatggattgtttattccgtctacctttgctgtgtcccctggttgtggcatacacacgtgtgggtataaaatcgtaaatcctatgtagtcgcgtagtgcatgcgcagaaggcttagacacgaaatgtcatttcagcaatgtgcctagagaagctctgacgccgccttggaagtaagtcgttgctgcctgacctttgggcgtctgggacggatgcctatacctgcacccagcagcactggaaggggcccaggcccttcgcagcacagcctatccccagaccgcttagtccttcataacatatatctccacggaaaagggtatttcctcccgtcagaaaaagcgccccagtctggtctgggttggtttttatttcacgttgttgcaagtaggcgaagtcccttctgtctcctcccttggggtaagtggaaaggagtccggcagggggcccgcagtggcctgcacaggggaactgggtagcgagagagttccaggcaattccgggggctgccccacagaagcaggtggggatcgacagtggctctccggcccagggaggagagcgcggtcgcgggtccctcccctcagcctggaggctgcagccgctcgagtcggcccgggtgggggcggggtgggggcggcgcggagggcacggagattacggcggcgccacccgggacatccagggccccgaggccctgggcggtccccacgcgagatcgcaaaccatgacaataggcagtcacccgaggtcaaataaaaacggagtgggtcccccgcgcgccgccgccccccgcgtccctggcggcctcccccgaggcccccggcggcctcacgagcccgcagtagccggtggcgacgtcgcccccgccccacctccctgcgcaagtgcgaggctgccggcagcgcggcgcacgctccggccgttcccggcttccgcgcaaaacttccatcctgtccacgtgaagttgtcgctgccttagagagggggaaagagctgcgggaaaagccggggagtgacgactgcggcggctgggcgcgctctctcattttcttttcttctcctttcccccctgtcgcagtccggagttttggctcctctcctttcctcctccccctcggagccggcttctccctccgccccgcttctcccccgcttgtgtacgctatttgttgtggggtggccgaaggggatgtcctgttttcaccagaggcacagcgcgaaggggaaacttcgacactggaaggaacgagaataaatacttaattacggacgcactgaaccgcggctgggacagacacttcgggaacccgaggcggaccgggcgacgaggtgagtgaccccttcttccaacccccgccccagggctcccgggggagcctgagttgagagaacccccaaactttccgggaaagtgcgcgaggctccgccggggacgccgagcgctgggtactgaggacgcgcagctggacggtgcgtgggcgcctgcgtccccggggggcgcttggaggccgggtgccccacgcctgagggcccgggccgctcggaccgcagcggtgctctctgccctagaagacgtccccaagccccaagggtcccttccgagcctgcctgtcccttccggggtcggcgcggagcctgcgcgtaacggagttcatccagcagtccagcgcgcggcttctacctgcaccccgcctccacctggcagaggcgcgagcatcggggtctcccccacatctttcttatgacgtgtattactttctgatgaccccctagatggtccaggcgcgaggatgctgacccagagtccttcggagggtcacaggcgcctgggctttcccggtgccgggtgcgtgtgtactttaaaggctcgcgttctaatctccaggcactgatcgggcttttcaactgcggcgatcccactttaatagtttttatgtggcgtggactgaatgtc

SEQ ID NO: 36 - DNA, 2501 bp, Homo sapiens
gtcacttccatgtgtcctgcagttctctgaaggggcgtgggacctaccgatgccaattatccagcattatctccagattccaagaagttggggtgtgagccagcaatcagtacagaaaagagataccaaaataagtttgagttggggagtgttccttcaacttcagttttctggaagagatcttttttttttttttgagacagagtttcgctcttattgcccaagctggagtgcagtggcacgatctcggctcaccgcaacctcctcctcccgggttcaagcgattctcctccctcagccttctgagtagctgggattacagacatgcacctgtaatttctactaaaaatacaaaaattagccgggcgtggtggcgcacgcctgtaatctcagctactggggaggctgaggcaggagaatcgcttgaaaccaggaggcggagattgtaccaagatagtttgttccagctaaacaacctggcgctagtgcaggaaaaggtggaaggcacggggctagcacaggagggttcaatattttcaaccttatcaagccatattttggcaactcttgtttttcacgagaagcccccgctgggcttgtcccagcgctgtcctgaggcttcccccatgagttccgatagggcagaggccgccctgagcgtttctctttcccctggtccaagagtggctcaaaagaaggatttttgactggaattggccactttgtgttactttttgacccttgacctcgccccaaagggggatgcgggggaggggctctggtaggggtggccccgctccttccaggtccgcaagcccaggttcccgcccaccgggctcagcccaccctgcggccgttcagggaggccgttggcacccgtgacctacgacccccttcccgagccccaccgaggtcacagccgtggcctcgtctccccatgcctgcttcccgccccctgcccgtgacgggcgtctccgaggaccaatgagcgcgctgtatccacccctcgggcggggccaagcgccgaccaatcgccgctcgggcgcccggccgggtccaaacgctccaatcgtcagcggcggcggggcgggcagagggccggggatggcaggttcaaccaacgggtgggcacgtcgtcctcgcgaggaggcgtgccctgcggccgggcgtgcggtgtccgcggcggcgcagggagggggagggaggtaaacaagatggcggcggcgtgtcgggcgcggaagggggaggcggcccggggcgcccgcgagtgaggcgcggggcggcgaagggagcgcgggtggcggcacttgctgccgcggccttggatgggctgggcccccctcgccgctccgcctcctccacacgcgcggcggccgcggcgagggggacgcgccgcccggggcccggcaccttcgggaaccccccggcccggagcctgcggcctgcgccgcctcggccgccgggagccccgtggagcccccgccgccgcgccgccccgcggaccggacgctgagggcactcggggcggggcgcgcgctcgggcagacgtttgcggggaggggggcgcctgccgggccccggcgaccaccttgggggtcgcgggccggctcggggggcgcccagtgcgggccctcgcgggcgccgggcagcgaccagccctgagcggagctgttggccgcggcgggaggcctcccggacgcccccagccccccgaacgctcgcccgggccggcgggagtcggcgccccccgggaggtccgctcggtcgtccgcggcggagcgtttgctcctgggacaggcggtgggaccggggcgtcgccggagacgcccccagcgaagttgggctctccaggtgtgggggtcccggggggtagcgacgtcgcggacccggcctgtgggatgggcggcccggagaagactgcgctcggccgtgttcatacttgtccgtgggcctgaggtccccggaggatgacctagcactgaaaagccccggccggcctccccagggtccccgaggacgaagttgaccctgaccgggccgtctcccagttctgaggcccgggtcccactggaactcgcgtctgagccgccgtcccggacccccggtgcccgccggtccgcagaccctgcaccgggcttggactcgcagccgggactgacgtgtagaacaatcgtttctgttggaagaagggtttttcccttccttttggggtttttgttgccttttttttttcttttttctttgtaaaattttggagaagggaagtcggaacacaaggaaggaccgctcacccgcggactcagggctggcggcgggactccaggaccctgggtccagcatggaggtggtggacccgcagcagctgggcatgttcacggagggcgagctgatgtcggtgggtatggacacgttcatccaccgcatcgactccaccgaggtcatctaccagccgcgccgcaagcgggccaagctcatcggcaagtacctgatgggggacctgc

SEQ ID NO: 37 - DNA, 2501 bp, Homo sapiens
ggaggatagaaatataaattaaagaatgacacaaataattataaagttacagctgttaaaagaaaagcatatggtgccaagagaacgtgtaatacaagatctactcatggaggtgagggaaagcttgcccatcaaagaagttatgattcaatccacgaagaccaggagttggctgggtgaagaaaaaaaggtcagaggaaggaagtccacactggggaaggctctaagcataaagggtaggaggattacagaggcatattcacgaaatttggagaaggctttcagtaagcaaggagaagccaaatgaaagtttacgggagagttggaggcttgaagacacgttcaaggatctggtttttatcttctctttatctcaagagcagtgggaagccattaaatgattttaatcagagggttggtataactagttttgtattttgaaaagctgaattcagctctcgtttgagaaactgagtgaaagagcccagaacggccgtggctgagggtgactcgtgggagactcctacacaagccatggcagtggcatgggctggtggcagaagagggaatagggagaagatttggaactcaatcttcctccattgacaaagtcactccagctttggcaaggcaattaattggtgggaaagaagatgcctagccctcctgatttcactgcactttctgcatcttcaacatgagtactgggaagtggcaaaacatccagaggcagcttgggtgctaggtggagcatgagttaaaattccaggatgaagcaaatgaacacttagaatgacaggaaagatttgggagttgggtttgggggagggctatttacctttattccctggagaccctggcacaaacccttgcctctgcaatcttcctctcaggtaaaggaattcattaaatgaattgctagaagatctactgaccagagggctgtacagaatcatatctttgagagtgggaagtaggttgatcacatagtttattatccaatcaggacatatctgaaagagaaagggggttctattaatatttaaactacaaaacatgtacaccaggaatgtcttgggcaaatctggttgccctagcaagaaaggaaatttgaaagtttatactgttctgctcccatgttaccccgtttgcacatgagagggtaagtattctctttcttcacctgcattaagggaataaaagcacaagcattcaggtgactcccaacccacttttaattttacagtttctgctatactctatacattctgaaaattacatttcccaccactatcacttcgtgataggtgatcatttacaattactcactgactcagtcccgggaagaggcggtgcaaaatgggacgctctatccaggtgctcattagaaatgcagaatctctgcctgcctcctagacctactgaattagaatctgcatttttaaataagatttccaggtgatcaatatgtacattaaaacttgagaaaaacctctagacttcgacctaaagaaaaacattttacaacttgacagtgtatgcacatacatacatgcatatagacacaactgaagcacaaatttaatgaagtagaatttaccgttactattttatttgggaaagaaatgtgctcgcgactcaatagattggagtattcactcctggatctcaacttgcaatttgaaaacgcatctctaaagcacctaggagcaatctgaagaaagctgaggggaggcggcagatgttctgatctactagggaaaacgtggacgttttctgttgttactttgtgaactgtgtgcacttagtcattcttgagtaaatacttggagcgaggaactcctgagtggtgtgggagggcggtgaggggcagctgaaagtcggccaaagctctcggaggggctggtctaggaaacatgattggcagctacgagagagctaggggctggacgtcgaggagagggagaaggctctcgggcggagagaggtcctgcccagctgttggcgaggagtttcctgtttcccccgcagcgctgagttgaagttgagtgagtcactcgcgcgcacggagcgacgacacccccgcgcgtgcacccgctcgggacaggagccggactcctgtgcagcttccctcggccgccgggggcctccccgcgcctcgccggcctccaggccccctcctggctggcgagcgggcgccacatctggcccgcacatctgcgctgccggcccggcgcggggtccggagagggcgcggcgcggaggcgcagccaggggtccgggaaggcgccgtccgctgcgctgggggctcggtctatgacgagcagcggggtctgccatgggtcgggggctgctcaggggcctgtggccgctgcacatcgtcctgtggacgcgtatcgccagcacgatcccaccgcacgttcagaagtcgggtgagtggtccccagcccgggctcggcggggcgccgggggtcttcctggggtccccgcctctccgctgc

SEQ ID NO: 38 - DNA, 1508 bp, Homo sapiens
attctacaattataaacatttagtgtattttgcaaatatggcataacctgttggcataaaattccattgttccagaaaatatcggtaataaaattatagaaaagttaaagatcttcatttcttatttcgaagcgtttgggagacatttcagaaacggatgggaaatgttaaattctgcatgcctgcttatttttctttccacaccgactagatgtaaacgagtgtcaccaaaagtacaccacaggcacccacacagattccttccataagggatccacaaagtttagatgtgaaatgtaccctaaagggttcctagccgtctctcatccctccctctgtgaaacagggaagacacatgtgttttcaagggcagagatggaacttgggccaatgggccggggggtggggggaagttggaagggactgccttaggacatggcaggatagtggattgtttctgccgccttgttgcccataccggggctctctgcaggcgcgtcggctccctccccccctgctgagaagaagccctgccaaaacatccgcctcccccgggaacccccccgtgggttcaaagcgggaaaatgttgcctcaggtttaaaataatctgtccaagccccccagcgcgggagaaacgttcttactcgctctctgcccccgggggtgctccccgccctctgctgccagaaccttggggagtgcctagacccggggcagcacacgtccgggccaaccgcgagcagaacaaacctttggtgggcggccaggaagctccctcccagccaccgcccccctccagtgcctttttttccccccatacaatacaagatcttccttcctcagttcccttaaagcacagcccaaggaaacctcctcacagttttcatccagccacgggccagcatgtctgggggcaaatacgtagactcggaggtaggcatccgtgggggggcgccggctcgggcgtgcggggaagtgtccgcttctgctatctgcctctccaaatatcccgactgctgatctggccccccagccctctttccacttcggagcactcctctggcgttggcaccgctgaagaatgggcctgggcggggaggtgaagagaagccaggaatgttttatgttttcctaatggagagggggcctcgggagcccctgagctaggaggacacggaaaaggggattggggtcctgagattgggtctgttgggcccaagacgcgttttctggatgggtctaggatgctcccctgtcgcgggaaccccgcggtccggccctgcctgctgggggttcgaaaaagtggattgcagggtggaaggtgttatttacccgagtcctggggacagtccccgggactctccgccaagcgcccaaaacggcaggtccccaagcggcgcgcggtgtttttgcactttccaaaattcttgaaacatctcaaaaatccttctgcatcttggcgtctggcagggttttccaaaaaaagtaaacctccctcccaaatgca

SEQ ID NO: 39 - DNA, 286 bp, Homo sapiens
tttgcactaggctggaagtggccgccagtcccccgtgcaattccattctctggaaaagtggaatcagctggcattgcccagcgtgatttgtgaggctgagccccaacagtccaaagaagcaaatgggatgccacctccgcggggctcgctcctcgcgaggtgctcaccccgtatctgccatgcaaaacgagggagcgttaggaaggaatccgtcttgtaaagccattggtcctggtcatcagcctctacccaatgctttcgtgatgctgctgctgatctatttggg

SEQ ID NO: 40 - DNA, 2501 bp, Homo sapiens
tctatacacattatgtcttttaaatgacacactagccttctgagggtaacttatattggcaacagttttcagatgtggaaactgtgaagacaatgttggtgatgtggaagcaacataaactttggagtctttcagacccaggtttgaatgtcagactgctttttattcagagtaacttcagagcattatttctcaccttaattttttttcaggcctctttgtgtctatgtgtcctcttcactcctgtccattgttcattcagtgatttttgcaccttccttcactgttagtgtgtagacacatagttctcctggctctgagacctatgttaattccattctaccatcctgccagcccactcaattcctattgagcaatgctagttgaaagttgtggtgggattaaatgttgcaatgagtattcaaatgaggttgaagtatctacgcattctacttacatatggtgaggtatattcaaggaaggctgtagccattaaaatctcaggaaataatttttcacctcctcaggtgaaagggtcttcaggcctttgtgttctggaaggttcatttatagccatttcccaaatgacaatgcgattgatgagtctagagtctagctcaaatagcaatggactggaagactagtttaggttttactaatgtggaacatagaacaaattatgtccttgtttcagcctgttcatctgtgaaatagagcctatcatatccagtcttccttgcctttaggtttgagttaccttctttggtcaaggtaagtaaatgcctatgatgtttggctgtgcacaagataaagctacaacaaagctacaacccatcttttctctgtagaagactgcaaaaagcaaaagagacccaggcaaaaatctcggaatgacttttggaacagagagcctccccagaatcagaagtcaaaggaatttaaaacatagggaggcccagggtctctactgacataaaggaaagatgttttccttataggtttacgtttacattttctctctctttccattcccacttgcatctccacctttacacagggcttatgggacctcctccacaaaagagcagttgcagtaacccacatcatcctctacgcctggctgtccatcaagaggcgaaaagcagccctatataggttctatccttggatagttccagttgtaaagtttaaaatatgcgaaggcaacttggaaaagcaagcggctgcatacaaagcaaacgtttacagagctctggacaaaattgagcgcctatgtgtacatggcaagtgtttttagtgtttgtgtgtttacctgcttgtctgggtgattttgcctttgagagtctggatgagaaatgcatggttaaaggcaattccagacaggaagaaaggcagagaagagggtagaaatgacctctgattcttggggctgagggttcctagagcaaatggcacaatgccacgaggcccgatctatccctatgacggaatctaaggtttcagcaagtatctgctggcttggtcatggcttgctcctcagtttgtaggagactctcccactctcccatctgcgcgctcttatcagtcctgaaaagaacccctggcagccaggagcaggtattcctatcgtccttttcctccctccctcgcctccaccctgttggttttttagattgggctttggaaccaaatttggtgagtgctggcctccaggaaatctggagccctggcgcctaaaccttggtttaggaaagcaggagctattcaggaagcaggggtcctccagggctagagctagcctctcctgccctcgcccacgctgcgccagcacttgtttctccaaagccactaggcaggcgttagcgcgcggtgaggggaggggagaaaaggaaaggggaggggagggaaaaggaggtgggaaggcaaggaggccggcccggtgggggcgggacccgactcgcaaactgttgcatttgctctccacctcccagcgccccctccgagatcccggggagccagcttgctgggagagcgggacggtccggagcaagcccagaggcagaggaggcgacagagggaaaaagggccgagctagccgctccagtgctgtacaggagccgaagggacgcaccacgccagccccagcccggctccagcgacagccaacgcctcttgcagcgcggcggcttcgaagccgccgcccggagctgccctttcctcttcggtgaagtttttaaaagctgctaaagactcggaggaagcaaggaaagtgcctggtaggactgacggctgcctttgtcctcctcctctccaccccgcctccccccaccctgccttccccccctcccccgtcttctctcccgcagctgcctcagtcggctactctcagccaacccccctcaccacccttctccccacccgcccccccgcccccgtcggcccagcgctgccagcccgagtttgcagagaggtaactccctttggctgcgagcgggcgagct

SEQ ID NO: 41 - DNA, 2448 bp, Homo sapiens
ctgccctgcctctacgacaaaagccaacgggtcttcagtacttttattaaaaaatagtcacgcagacagtgccctggtggctctgccccgcatcccaactctggggtgggggaaaggggtcaacgttttcgcagccccaaaccgggccatcacttgcccaccgagtcgaatatgatgcggttctgctcggcgcgctcccgctggctctgcgtccgcgccactccagcagggtccgcagcaggtgaaaggtgaggtcaatggacagagaagggttgtcccgccgcggccgctcgcctgccgtcccgagtcccaatcggccgggccccgcgcgggcgagaagcgtccgccagcagcaagaggagcgcgcgggccccgcaccctggttccgtgccccggggctccagcgcagactcgggtcctggacccggccgcctcggggctcctctggctgctcccagggcacagctgtaccaggagcagcagcgcggccagcagcgctgcgtcccgcctgcctcatggtgccgccggccctggacacacaggggcagcgcagggtgaggtgcgcctgggacagctgcaggcgccgctcccctccccgcgctcgcccggcgacccctccggccgccgcccaatgcccgcagcctgccctccagccccagccactgcgccagtgctgttccatcccttccacccagcctccctccccggaggagcgtggtggctgagctgagcggagtcctggtgcagggggaggctgggcggacgctctgagccactcacaggttgtcggcgagcgtctgtacggtccaagattgagctccagtctctgtccctcggggcaggctgaagacgccttggggaacacagggtctgtcccggcgtgtcgccagccttatatagtgccaggacagctccgactgacgtcagcgaagaacatgcactgattgtagaagcaatgacagccacagcttcgagtctgacggctggcgggccccggagggcgcacctccctacaccagccttcgtgcccctgggcgtagcgctggaagcagcactggacgcaggaaagcgagaagccggctggggcgtaaagactgctctgggacccacgggagtcccatcgccccgcttagaacagccagcaatgactagggccgtccccagaccagactagtccgggtcgcgtgttctgacacacgaaagggaggcgggaccgtgaggctgtccatggtgctgaccccgtcctctgcctctagaagtggccagaaatgtgagaacgctgtgccgctggaacccactgcctccctgcagctatcagttctgcaaatgcaggcatcaggagtccaccgctggcactcagccaacacagtgggacccactgagaggcagtctgccacaaccaaagtctcccagcattcttatctttttccagccccaggatccaaatttgtagggctgtctgacaggcaccatgtaacagagggtctctagcatccgagtgctttcagaccacaaatggctggcccatctgcttttgagtttgccaaagtagtttagcaaagttcagtttctctcctgggaatcatagcagcagtgtaactctgcccatgagcagcaaagaaatatgggttcaagtttctgctaactcctggtgtggacaggtcacctccctcctaccaacctcagggtcctcatttgtaagactgggcttggccaggcgcggtggctcacgcctgtaatcccaacactttgggaggccgaggcaggcggatcacgaggtcagtagtttgaaaccagcctggccaatatggcgaaaccccatctctactaaaaatacaaaaattagccgggcgtggcggtatgcgcctgtggtcccagctactcaggaggctgaggcaggagaactgcttgaacccaggaggcggaagctgcagtgaggcaagatcgcgccactgcactccagcctgggagacagagcaagaccctgtctcaaaaaaaaaaaaaaaaaaaaaaaaaaaaattgggcttggtggtctcttggcttctttccagctctagaaatgactccccaatagttttctgcttaaaaacttactcattaccactgcagattccggattacatatttaataacatatttactgaggcaccatataaagggttccgggagtctctaaagagctggagctacaagaagcctaggcagggttagagtaacaaatgtgtctatgaagagtggggatgagtggcatttgctgggatatgggtgtaaagttgataaggtcatgaaggttcaacagatatttatggagtgcctagtatgtggtgggaataagactattatcaagggctctaaagcagtcagtgtacattttagagtgaagaggggcattgcagggtgctagtcctcttaagctctgaccggcaacccaaccccgtggaaactgg

SEQ ID NO: 42 - DNA, 2344 bp, Homo sapiens
gcctggcacactcaagactcccacggaggttcagttccacactcccctccaccctcccaggctggtttctccctgctgccgacgcgtgggagcccagagagcggcttcccgttcccgcgggatccctggagaggtccggagagccggcccccgaaacgcgcccccctcccccctcccccctctcccccttcctcttcgtctctccggccccaccaccaccaccgccaccacgccctcccccaccaccccccccaccccacaccaccaccaccaccaccaccaccaccaccccgccggccggccccaggcctcgacgccctgggtcccttccggggtggggcgggctgtcccaggggggctcaccgccattcatgaaggggtggagcctgcctgcccgtgggcctttacaagggcggctggctggctggctggctgtccgggcaggcctcctggctgcacctgccgcagtgcacagtccggctgaggtgcacgggagcccgccggcctctctctgcccgcgtccgtccgtgaaattgcggccggggctcaccgcgatggccctcccgacaccttcggacagcaccctccccgcggaagcccggggacgaggacggcgacggagactcgtttggaccccgagccaaagcgaggccctgcgagcctgctttgagcggaacccgtacccgggcatcgccaccagagaacggctggcccaggccatcggcattccggagcccagggtccagatttggtttcagaatgagaggtcacgccagctgaggcagcaccggcgggaatctcggccctggcccgggagacgcggcccgccagaaggccggcgaaagcggaccgccgtcaccggatcccagaccgccctgctcctccgagcctttgagaaggatcgctttccaggcatcgccgcccgggaggagctggccagagagacgggcctcccggagtccaggattcagatctggtttcagaatcgaagggccaggccccgggacagggtggcagggcgcccgcgcaggcaggcggcctgtgcagcgcggcccccggcgggggtcaccctgctccctcgtgggtcgccttcgcccacaccggcgcgtggggaacggggcttcccgcaccccacgtgccctgcgcgcctggggctctcccacagggggctttcgtgagccaggcagcgagggccgcccccgcgctgcagcccagccaggccgcgccggcagaggggatctcccaacctgccccggcgcgcggggatttcgcctacgccgccccggctcctccggacggggcgctctcccaccctcaggctcctcggtggcctccgcacccggggcaaaagccgggaggaccgggacccgcagcgcgacggcctgccgggcccctgcgcggtggcacagcctgggcccgctcaagcggggccgcagggccaaggggtgcttgcgccacccacgtcccaggggagtccgtggtggggctggggccggggtccccaggtcgccggggcggcgtgggaaccccaagccggggcagctccacctccccagcccgcgcccccggacgcctccgcgcggcaggggcagatgcaaggcatcccggcgccctcccaggcgctccaggagccggcgccctggtctgcactcccctgcggcctgctgctggatgagctcctggcgagcccggagtttctgcagcaggcgcaacctctcctagaaacggaggccccgggggagctggaggcctcggaagaggccgcctcgctggaagcacccctcagcgaggaagaataccgggctctgctggaggagctttaggacgcggggttgggacggggtcgggtggttcggggcagggcggtggcctctctttcgcggggaacgcctggctggctacggaggggcgtgtctccgccccgccccctccaccgggctgaccggcctgggattcctgccttctaggcctaggcccggtgagagactccacacagcggagaactgccattctttcctgggcatcccggggatcccagagccggcccaggtaccagcaggtgggccgcctactgcgcacgcgcgggtttgcgggcagccgcctgggctgtgggagcagcccgggcagagctctcctgcctctccaccagcccaccccgccgcctgaccgccccctccccacccccaccccccgcccccggaaaacgcgtcgtcccctgggctgggtggagacccccgtcccgcgaaacaccgggccccgcgcagcgtccgggcctgacaccgctccggcggctcgcctcctctgcgcccccgcgccaccgtcgcccgcccgcccgggcccctgc

SEQ ID NO: 43 - DNA, 2350 bp, Homo sapiens
cagatgcactggtgagaccaggccctggctgtgaccttgggcctgcatcatgacccccgacccttgacccagatcacaactatgacctggccgtaacctcctgacctggacctcagtccctcagtccccagagcctgtgactcctgaccctgacctggaccacaactcttgaccctgaatgtgactcctgagacccaacttgacagtaacatttgaccctaaccatcacccttgatgatagtccctgcccataccctgatagcaattgtgaccctcatgactctggccctgaatgtgacctataactcctgaatttgactgtgacatttgaccctaatcataaccactaaccatagcactgaccataaccttgactgtgtgactcttggtcctatctctttcacagcccctgcctcttctcagaatcccttctctggaacctggttgggttcataatccctgaccctggcccctgacttgaggcagaattctggaccctgactataacttctgatcctaactggattcagattccagtcactaactctgacccatggctcagccgaatcccatccaatgatcctagtttataatacttgactggtcccttgccctagttgatttctgatccctgtctgatccctctcctgactccaaaatcctggcacaggtagttcctagaaacctagacccacaggacttgcaaccatggtccccggaacccgagaaccttggtcagccctacccacctctgccatagagccctcccccagcctccaactcatgagacttcccaccacctcccccagacaccctactccaaggggattggtcgggtgtgtcccgagactggaccctttctgaacacccccaccccccacagatgtggacgaatgcagttcgggtgcccctccctgtggtccccacggccactgcactaacaccgaaggctccttccgctgcagctgcgcgccaggctaccgggcgccgtcgggtcggcccgggccctgcgcaggtgagcagcatagggacccgccagagagtctgggagtagggcctgggttccagggcaaagccggctggaaaggtggaggcgggaccaaggcgctgtgggaggagcttagaaacctggcattggtgggggcggggttactgcgatgtgggcggagcttgtctgggaggccgggtcccgtgactccgcccaatctcccgcgtaccctagacgtgaacgagtgcctggagggcgatttctgcttccctcacggcgagtgcctcaacactgacggctcctttgcctgtacttgtgcccctggctaccgacccggaccccgcggagcctcttgcctcggttcgtacccgggctgatcctggccccggaaagggtgggcttagggcaggaaaaggcgggacggggagaagagggcgaaaaggggaaaacgagtttttagccggggtattccagcaggatcagggggcagctggtgggagtctcgaggcagtgagggggggcggggcgtggagatgaaagggccgagtctgggtatttggaccgtgattgtaaagaagctgttctaaacccgtcggggggcggtgtttgcagggagggaagtagcgtgaggcaggttggggaaggcgtgagaggcctaggagagccgaggggcggtggaggggtgtggcctagaatgttaggcggagcgggaggtgggccgggccttcggacgccctgtcccgcagacgttgacgagtgcagcgaggaggacctttgccagagcggcatctgtaccaacaccgacggctccttcgagtgcatctgtcctccgggacaccgcgctggcccggacctcgcctcctgcctcggtgagaggccccgccccggcctgatccctcctcccttcgactccccgactcgccgattggcctcccacctctgtctttcctcctccgcttctcccctccccttacctctttcccccgcctcctctcctagcctccccaactctcctctaccccaatcttctcctgccctctcctctgcttccccggcctcccccttctgactctcctctcccctctttgtatcccccatcttgcctccctgcttcccacatccgaccacccgacctctctcctcagacgtggacgaatgtcgcgagcgaggcccagccctgtgcgggtcgcagcgctgtgagaactctcccggctcctaccgctgtgtccgggactgcgatcctgggtaccacgcgggccccgagggcacctgtgacggtgagcctgcccccacccgccttcgctagcgcttgcaacgcggtgctggaggctgctcccttggggactgaggaggggcgccctg

SEQ ID NO: 44 - DNA, 2206 bp, Homo sapiens
gggcattccctgggatggcaagtggcaccagcgctgtgagatggtttccttcctgccgtcaggcgtcaggaggcctgctcgggtctgcatgtgcctgggcttggcaggtggggaggcggcacccagggcagcccccgcattggaagctctaggaacttggatctaggctgaaggcctttgctctagagttccggattgctgagcttggaacagctcctcctagacacagtgtggcgcgggagcagctgcatgagggcccacgtactctgcacacatcagcagcccatccgaccttgtccctggtcatgcgaaacgcatgcccatccgacctccgaccttgttcctggtcatgcaggttccgcctgggctgtgacaggaggctcggcgccctcaggcacctggcaggctttcccgaccttctccctgagcgacaggaatgggaagtgagcaaatccaagtagaattaggaggctctcctcagaggagcctggcggaacccggtcctggctgtgtgccgagtggcggggcacccacagggagatgagccagtgcctatctcttgcctcagtctccccgtggtcgcctccttcctcagaaggggctggcccaggctggtgcctccgtggcccctggagcatacctgctgccgccttccctggcctctggcgacagcaggccttccgtactccacctgtcccccagccagcatggctccacacagaacacggccgcagacaaccctcctgtgtcctgcatagcgaactgccactctgcgtgggccccactgccaggttagggaggcaggagctgcccccaccccctgcccgggagctgtcgtctgtctttcggatgagtcaggaacaaatgcgtcaacactgggtggccgccctcgccactcctgcgcacgggccctgtggggagagccaggcagtgggtggcgtgggacaggtgatgcccatgcccagtactcaggagacctgcatggcagctcctaagatgggtacaagcgatcataaggagggatgtacgtgtctcatctccccacccaccacgggatcaggttgaggccgtccagggagtgcatgggagggctgcgctcggcgcatctgcagagatcccctgaagaggggccctggctgcctcccactggggtaggtgcgggcccaggtccccgacaccgtgacggtgctgtgggactttgatggacctcacccggggagcccaggcctgctccacggcaaggtggccacgcactgcctctgcagtcctgagcacaggctccatacgggacctgaggcctgggctccatgacacttgggctatgtgcttccctggtgcttccctcctggggatgaaatcacacccataggtaaaggtttgggagtggagggagacagcaggagacaaagcaaggggacgaggactctggcagccacaaaggcagcgggagggccctggaggctcctgttgggcagcgcagtcaggaaagggcccactaggtgggagaggcaggcgcctggtgagtgctgagatctgcaccacgagaagggctgggctcccaaggcatgcatggggcctgggagtggagggagtgtgagcgggtgttaggacggggtctggggcgagcgggtgttaggacgggcctgggagcggagggagtgcgagcgggtgttaggacggggtctgggagtggagggagcgcgagcgggtgttaggacggggcctgggagtggagggagcgagagcgggtgttaggacggggtctgggagtggagggagcgcgagcgggtgttaggacggggtctgggagtggagggagcgcgagcgggtgttaggacggggtctgggagtggagggagcgagagcgggtgtcaggacggggtctgggagtggagggagcgcgagcgggtgtcaggacggggtctgggagtggagggagcgcgagcgggtgttaggacggggtctgggagtggagggagcgcgagcgggtgttaggacggggtctgggagtggagggagcgcgagcgggtgttaggacgggtctgggagtggagggagcgcgagcgggtgttaggacgggtctgggagtggagggagcgcgagcgggtgttaggacgggtctgggagtggagggagcgcgagcgggtgttaggacggggtctgggagtggagggagcgcgagcgggtgttaggacggggtctggga

SEQ ID NO: 45 - DNA, 2233 bp, Homo sapiens
ctgctggacgtggacgcagacagcgggctcctctacaccaagcagcgcatcgaccgcgagtccctgtgccgccacaatgccaagtgccagctgtccctcgaggtgttcgccaacgacaaggagatctgcatgatcaaggtagagatccaggacatcaacgacaacgcgccctccttctcctcggaccagatcgaaatggacatctcggagaacgctgctccgggcacccgcttccccctcaccagcgcacatgaccccgacgccggcgagaatgggctccgcacctacctgctcacgcgcgacgatcacggcctctttggactggacgttaagtcccgcggcgacggcaccaagttcccagaactggtcatccagaaggctctggaccgcgagcaacagaatcaccatacgctcgtgctgactgccctggacggtggcgagcctccacgttccgccaccgtacagatcaacgtgaaggtgattgactccaacgacaacagcccggtcttcgaggcgccatcctacttggtggaactgcccgagaacgctccgctgggtacagtggtcatcgatctgaacgccaccgacgccgatgaaggtcccaatggtgaagtgctctactctttcagcagctacgtgcctgaccgcgtgcgggagctcttctccatcgaccccaagaccggcctaatccgtgtgaagggcaatctggactatgaggaaaacgggatgctggagattgacgtgcaggcccgagacctggggcctaaccctatcccagcccactgcaaagtcacggtcaagctcatcgaccgcaacgacaatgcgccgtccatcggtttcgtctccgtgcgccagggggcgctgagcgaggccgcccctcccggcaccgtcatcgccctggtgcgggtcactgaccgggactctggcaagaacggacagctgcagtgtcgggtcctaggcggaggagggacgggcggcggcgggggcctgggcgggcccgggggttccgtccccttcaagcttgaggagaactacgacaacttctacacggtggtgactgaccgcccgctggaccgcgagacacaagacgagtacaacgtgaccatcgtggcgcgggacgggggctctcctcccctcaactccaccaagtcgttcgcgatcaagattctagacgagaacgacaacccgcctcggttcaccaaagggctctacgtgcttcaggtgcacgagaacaacatcccgggagagtacctgggctctgtgctcgcccaggatcccgacctgggccagaacggcaccgtatcctactctatcctgccctcgcacatcggcgacgtgtctatctacacctatgtgtctgtgaatcccacgaacggggccatctacgccctgcgctcctttaacttcgagcagaccaaggcttttgagttcaaggtgcttgctaaggactcgggggcgcccgcgcacttggagagcaacgccacggtgagggtgacagtgctagacgtgaatgacaacgcgccagtgatcgtgctccccacgctgcagaacgacaccgcggagctgcaggtgccgcgcaacgctggcctgggctatctggtgagcactgtgcgcgccctagacagcgacttcggcgagagcgggcgtctcacctacgagatcgtggacggcaacgacgaccacctgtttgagatcgacccgtccagcggcgagatccgcacgctgcaccctttctgggaggacgtgacgcccgtggtggagctggtggtgaaggtgaccgaccacggcaagcctaccctgtccgcagtggccaagctcatcatccgctcggtgagcggatcccttcccgagggggtaccacgggtgaatggcgagcagcaccactgggacatgtcgctgccgctcatcgtgactctgagcactatctccatcatcctcctagcggccatgatcaccatcgccgtcaagtgcaagcgcgagaacaaggagatccgcacttacaactgccgcatcgccgagtacagccacccgcagctgggtgggggcaagggcaagaagaagaagatcaacaaaaatgatatcatgctggtgcagagcgaagtggaggagaggaacgccatgaacgtcatgaacgtggtgagcagcccctccctggccacctcccccatgtacttcgactaccagacccgcctgcccctcagctcgccccggtcggaggtgatgtatctcaaac

SEQ ID NO: 46 - DNA, 2398 bp, Homo sapiens
actgtatttctggccccacagtcttctactgccgactttaggtctctctggatctcaggcccccttctctaagatgcatcctagaggaccaaaaatacactttatttgggcttcgcctgcttttgtggaagggtagtttactagaggatataatctcgtgttttaatttgctctctctcctaaaggaaatgtggagaaaaaaaaaaagcagaaattggaaataaccaatatttagtttatttcattcgattcttaggggaactggtgaggagcctaagatgattttcccttcctagagaaagaatccaaagtccagggaaatagcgacaggggagttcaagactgcccctgctagtccttccttggctactctccgctgcgatcgcaggatagctctcattagcaggagaatcgggcaagtgtgtggataagtagagagtgtgttgaacaacttgtaacgttttatgaaatacgcattgtcatggttccctaaaaggctttgcggaagccgtttgtctttactaatcaagtctttacttacacaaaagtagaagtagaagtagttttagaaaacatactaacaatcttctatccccttgaagaccagagtagcagaaaacaggtgatttgcattataaaattgcactcactttttcctcctttcagatttcacattacattagcccatttgtgttacggtgtataaaaaatggaacaggcgcctccactgcattgttctcctttaaaaatagatcacttacaccctaactttgttttccttaaattcgattcttaacaggagagctttctattatttcagatggagtgaggttgcacgactgggatggaagaaaggaatcccttaaatttgggggaatttctgttctctgttccaagaccattttacttggggtgtgggggtgggcgcggcggtcagggcagtggaacgcagtcgcggctgcgccatccctgcacttccaggcgcgcgggagggaccggcggggacgcgagctgcggactctggcgaactcgggggaggcagacagggggaggcggacacccagccggcaggcgtctcagcctccccgcagccggcgggcttttctcctgacagctccaggaaaggcagaccccttccccagccagccaggtaaggtaaagactgctgttgagcttgctgttactgagggcgcacagaccctggggagaccgaagcttgccactgcgggattctgtggggtaacctgggtctacggaagtttcctgaaagaggggagaagggtttgcatttttcctatggaggattcttctctctctagcatttcgtttgatgtattcaactggtagaagtgagatttcaacaggtagcagagagcgctcacgtggaggaggtttggggcgccgcggcgccacccccacccctcctcgggaccgcgcctatttctaaagttacacgtcgacgaactaacctatgctttaaattcctctttccagccccgtgagtccgcggcgacattgggccgtggggtggctgggaacggtcccctcctccggaaaaaccagagaacggcttggagagctgaaacgagcgtccgcgagcaggtccgtgcagaaccgggcttcaggaccgctgagctccgtagggcgtccttgggggacgccaggtcgccggctcctctgccctcgttgagatggacaacgcctcgttctcggagccctggcccgccaacgcatcgggcccggacccggcgctgagctgctccaacgcgtcgactctggcgccgctgccggcgccgctggcggtggctgtaccagttgtctacgcggtgatctgcgccgtgggtctggcgggcaactccgccgtgctgtacgtgttgctgcgggcgccccgcatgaagaccgtcaccaacctgttcatcctcaacctggccatcgccgacgagctcttcacgctggtgctgcccatcaacatcgccgacttcctgctgcggcagtggcccttcggggagctcatgtgcaagctcatcgtggctatcgaccagtacaacaccttctccagcctctacttcctcaccgtcatgagcgccgaccgctacctggtggtgttggccactgcggagtcgcgccgggtggccggccgcacctacagcgccgcgcgcgcggtgagcctggccgtgtgggggatcgtcacactcgtcgtgctgcccttcgcagtcttcgcccggctagacgacgagcagggccggcgccagtgcgtgctagtctttccgcagcccgaggccttctggtggcgcgcgagccgcctctacacgctcgtgctgggcttcgccatccccgtgtccaccatctgtgtcctctataccaccctgctgtgccggctgcatgccatgcggctgga

SEQ ID NO: 47 - DNA, 2114 bp, Homo sapiens
aaagttacagcagaagggaagctgaagtttgaaaacacattacattttgtcccttggttctcaaaccccctcagttaaaaatctaggcaaaattattatatccaatacagtaaccatctgtaaaacttcagaacagtaaacaaaggacataaagaaatgtatcttcatctcccttaaatcgaaaacaagcaaaacactacagaatcagattttgctccattatataggaattgtctggcaaagatccctctttttttcctaaaggtgaaatttcaggctgctgaacattgaatgggtaaagatttttacaatgctgtatctaagtgagcactaatgacttcacctactaataacgactacttcttgggaataagaatttactaggaagcaatttttaaaactttacaaaggatccaattggtccctacaacatggccagtagtcacatgtaaattctatctggaagattggggtgaaattaaggggttggtgaaggaatccaggaaaattaaaacattaaatccatttttaatagctgacaatgctatgcctcaagagaagaaaaagagtatattctgctacagtgtgtgagaaacccaatttttgtttttggatgatggtggtatgtcacttcccttaaagttaggcaccagtgtgagtagtgtcccagagaggtgaacgtgtagctgtgtcagacatttatagccccattcttaaaagacacatgggaaaacagtcaaaagtcctcccataactgcaccaatttgaccaataggaaaacaagtggaaaatgcagtttcaccaaagcagagtagaggttccttttcatcaaaccctcaggagggggaggggagaacacagaatggccagggggtactttctggaagccgaagagagattaaatgatgactcttacatcccccccgctgtttaagtgctgaaactaattcagatcccactttctccttcatgttaactctggattccccgagtaatttggagcctatgctccaggtttcctgaagattagaagctcaagaagatgggaatttttagaacaataactaggggaaactgtttacttgaagggccaagggtagggggctgcgtttggtattttactgagaccccgtccattgaaaacattgtttctaacgaaatcacccagcaccttgctctatttgcgtggctgttttccttacagtggtgtaacttgtgttagctgattgtctttaggattgttgtaaatcttctgatgagcagcacttagaaggggctttagtaaaaaccatgcgccccaaatttctaaagcttcgtttgggagagaggttgacatttgcacatgaagtctgtcttttggaaacagcaggaggacgcaggaggggcgaagtaaccccgggaagacgttcttccccctcccttacggattcagtgtagttcctggcataagcaattctgtcaccgggcggtcttttctaattcgtgtgggggctgatattaacataagcagccgcctcttcgggtgcgagtgggatcccaggtccgggatgtggtgggtgcggtgcgggagaggcacccgccgcccccttcactcggatgttagaggcaagttgttcgtgtgaactcgagcgaacgactggaggttggctgttgtaggttcactccttcaggatgtgggtttcagggggcgttttgatgtgatttaattccgaccgtgaaaacaattgctaggggctggctggattgctgttggtttttcccctcctggtggctttgcttggtttgggtttagtttgggaacaaacttgttttatatcaacacttccttctacatcgggcgccgtcgcctcaactgcgcgtggggggcgaggcgcccaccccgcacaagaacagaggagcgggggagaagagacggcctcgctgctcactgggtaagcggagcccagccccgctcgggagcgggcaggagagacagggtagtgacccccactcacaccagaaaacccctccccccggcgattttgctgccaactcgagtcggctacagacagtccagtgagtccttaattacaaggacgagagaaaagcacggtgcccctcgagtcctctccgcc

SEQ ID NO: 48 - DNA, 2382 bp, Homo sapiens
aggccctggaggtggccactgtcggtccaggcacggcttcgctcgggactactggctgccctcgtggggtgccccgcctggggttccctcttaccctgggacgttccaggcgcgttcagcctgagctggtggagagggcgggggcgggggcggctggggtcccgaagtccaggtccctcttcccacttccccgccggccctgccgctgcggccctcgctcccgcgctcgctcgctctcgagtctctccctctctctcttctcttcctctctctctctctgcagtagtaacaacctgatcccgcttcccccacccgcctcttgagatgctcctcacatccgcctgcacacagcgcgtgcggcccctccgaaggcgatccccgcaaaccgcgacgcaggtcctccgccccaggcaatccccgctgcgggagaggccgcctcctggcgcccacgccccccttctgcagtccttactgccggccgagggggaaatgggcgacaggggaaggggaggtgtgtgcgggacggactaggctggggcagaggggtttaaactggcgcggtcctacagaagtttgaggagggcggggccggctccgagcccccggagccctacgggactcccccgattctactgaggagtccccgccagctccgtgcactcctgcaacactccccaccccacccgccagctccgagtttacagcctctcgggtccggggattggctgggggaggggacgggggggaggggaccccctggctgtagggaacggcgtgcgggcgggggtgggagggaaacgatttgcttcaggagatagggatgaaggttttcctgagtcaagggagggagaagagaggtggaacaaaaggcagatgctggaggggaaggggagctggggagctcgccccgagggctccggcagcccgcggtcccctgcctcagtctgtcccagagggtgaggtcaaggctggtgccagggctcttcaccggccacctggatcccacgcgcccagcacccacttctctccgcacgcccacttcatgcacctccccgcgcccttcccacggcttctctgcggcgagtcgcctttgcttccccgcaggtccccggtcccagcgctaaggcaccgcggcttctctcgccttctctccgcgttgaacccgggctctccgcggggagaaataggttgggggcgaggggttcccgagataattcaggacacctccccggggtctagccaggtaattccgacgcccatggatttccggattacagttcccaccgcgggctcagtcctactcttagtttatcccgcggtgagcgccaagccccaaaagtcggagtgtcaccgtttggtgaccccgcgtccgcccgcgcctcttaacctatggtcatctgtctgtcacagcgaacctttccctaggaaagaatctgccctctgcaaagaggatgtgtaatgctggaaagcccgcctttctccccatcagctggattctgagagttgggagagatgaccaatgaacaggctgagggtgtcacagccctgctactttgggatggggggtgcagtaggggagctacagtcttcccagaggccaggtcattctacccagctgcaccccatccccaacctttcagtgggcgacacctgcagggtgttgggactgggagaaacctcagataccttaaattccaaaccccattttccagatgaagatactgaggcccagagtgggtcagtgagttgcccaaggtcataggacaggtcagaatggaagctttccgactctccccggggcgctgggttcacagctccaccttgccaccccctgccccggaagtgagcactgaagtcacttaagagaggccagtgaccaaaggcagcgattcccaggtgcagaggctggggcagacgtgcccatgagcttgttcccccgcgcaccctcccccacctcgtccccattcctgtcttggttaccatgtgcctccatcatcctgagattcagagaggtgcagcggcttgtcgaaggtcacacagcacactgagtagggccctcgtttccactgcccagctgccccctcccattgcccacccgggcctctgcaagcttgccaggatccccgggagcctgcttcctccaatgcacagagccgtggcgcgtgtcaaagtgtgggaaagttcctgggagagggaaggggtagaaaatacagccgctcatctcaaccttggacggctgcggcaaggcaggggcgctcagaaaggcagccagtcctgcgcaccgccggtgcctccggcacaccccactctgcgccaggggctccccagggtcgcgcgagcatgttcttccagctcctcctcagcgaagcaggcgcggcgggg

SEQ ID NO: 49 - DNA, 2192 bp, Homo sapiens
ccatataatttttaaaaagaaagaaacccctaaattacagatgtgcctggaaccagaacccagaaagcatctgggtagggaaaatagtttctagtgttcaaggccaaagccagtagggcctccttggatgggaaagagatatgagactgcaagtaattcctggacattacctatttgttattgtgttttcatcccttccctcagtcacctacacgttttctttttccagctaaaatgaatctaatctttgttacagtacttcaccttgttaataaaacccaggactgaagaatgagaataaaagggttttatactcaccatttcttaatttctgattctagtctggacagaacaatcactcattctagaaaattggcatagggagcatttattagcagttgtaacatatcactgccaaagggagggattctgtaaggcggcactgggtgtctcatatgtatgggaaacccgaggccacgttcagtgccaaccacaagcattttcatctctggccaggcaagccttgatccctgaattttgagctctcaacctcttttaaaatgagaaagagatggtttcttccagagtctttcagcttctaacttacaggcaaacactaccgtatgctgtcccccagcagagattggttttaaccaaggcaaataagttaggatggactttgttgaccgtgatggctcagtgctacatctcatatatcctaccacctttcagaacatttaatagtgctgctcctggcagccctggggttgtagtccttgtagagaggaggaactggcattgaaagaaatagttgagtttcactacgccacgtggggcgctcccattgctaagagcaatctcccctccctgggaagaaaagcgtgggcggggccggggcagtccctcccctccgcgttgccttggagaccatgggcgtccagctgcagttgtcgctggaccggccctggctgccttgagaggtgctttctgcaggcggggacgcggccaggccggacgcaaggcctccctccaatctaccgggctcagggggacggccaggggctgctcagtctacttggcgggctagggagggggatggcagaggctggttgggtcttctcagcacacagtaggcgcctaattagcgtgacctgaatcaggttactctctccctccaattctcctccctgtgtcccatggagggtggattagggtcccggatgcgaattctgcgccgcattagagttccagtcccaaccgacaccttgagcgccgttaacttttccccgaagagcatggcagagtgaagcacaagcaataatcctgtattattcgcgttcccagagtcccttcggatttgcgccatgcgcggcggggagaaccggcctcctgctcgagttcagagctcatctgaggttagtttcatcgtttcgttgaaagttaaaaccctaagtcgacgttccccagccgcctaccccccagcagagagtccttccccggggagtcctgccctggggtgccgcctcgaggccagacgtcgtcccgcctggacctgaacctgagtttgggacgggcgatttcccaacctcaggaattggaattgagacaccaaagcctagacgcgtttcctggacgacggcttcccggcaggggcatccagccagcggccaagatgtcgtcagtggggaaggtgacccaggttccgaatgggaaagcctaccagcagatcttccaggctgaggtaggagccgccctctgtcccgcttttctccatcccccttcccttgctttcttccaaacttccctccctcccagggcttccctactggaaattgaataaaacaagggctttgaaattactttgattttaaaaataattcttgcttgttcttaaatcgtaccaatacaaaattagaatgtcagttcttgaaaattagaaaacttaaattaaaattttaaatgtaaattactcagaaatagcctggatggaaccactgggtgacctctgtttttcccatgcataaaaacatgactaatttttgtatttaaaaaataggtttcattctgtactagtgttttgaaatctgctttttcttcataacagtatctcacagacccttttctatgcccgtgggcgcccatgtatttcaccatactgagcagctccccacttgttgacctaggactcccat

SEQ ID NO: 50 - DNA, 2192 bp, Homo sapiens; identical to SEQ ID NO: 49

SEQ ID NO: 51 - DNA, 2244 bp, Homo sapiens
  modified_base (2126)..(2126): a, c, t, g, unknown or other
  modified_base (2128)..(2128): a, c, t, g, unknown or other
  modified_base (2131)..(2132): a, c, t, g, unknown or other
ttccattttctctttctcttccgctcttcccctactttcccttctcccttttctttttctttcttactctctccttgtccctgagctttcattgaccgacccccccccatttcattcgccctcccctcaatgtgccaacctttgccctatttccgatcttcccaggtactgggaggcgggatgggggtgtgcgttttcctctaggagccctgtctttccaagacccacagaaaccaggacctgcccttattcaaaaccccatgcacttcaagtctcttttagacaacacatttcaattttccgggctgactagtctccctgtgcagaggcagttgagaggctttgctctgcagagggaaaagagctctctactctcccacccaccatataggcaaacttatttggtcattggctgaaggcacagccttgcccccgcggggaaccggcggccaggatacaacagcgctcctggagcccatctctggccttggcgttggcgcagggactttctgaccgggcttgaggggctcgggccagctccaatgtcactacctacagcgagggcagggtgtaaggttgagaaggtcacattcaccgctttgggaggacgtgggagaagagactgaggtggaaagcgctttgccttgctcaccggccgtccttgccccggtcccagcgtttgctgggatttgccaggatttgccggggctccgggagaccctgagcactcgcaggaagaggtgctgagaaattaaaaattcaggttagttaatgcatccctgccgccggctgcaggctccgcctttgcattaagcgggcgctgattgtgcgcgcctggcgaccgcggggaggactggcggcccgcgggaggggacgggtagaggcgcgggttacattgttctggagccggctcggctctttgtgcctcctctagcggccaagctgcgaggtacagccctctattgttctaggagcacagaaacctcctgtgtgggcggcgggtgcgcgagctagagggaaagatgcagtagttactgcgactggcacgcagttgcgcgcttttgtgcgcacggaccccgcgcggtgtgcgtggcgactgcgctgcccctaggagcaagccacgggcccagaggggcaaaatgtccaggtcccccgctgggaaggacacactataccctatggcaagccagggtgggcgacttcccatggatcgggtggaggggggtatctttcaggatcggcgggcggtctaggggaacaattcgtggtggcgatgatttgcatagcgcgggtcttgggatgcgcgcggttccgagccagcctcgcacagctcgcttccggagctgcgagctcaggtttccacccccgatcccccgggctttcctcgcaccgctgagcccagcttgtggggtgcactcgaccaacgcccgacagggctggggaatgtgacaggcagcaggttcacccgggcttggggagggggagtttccgctttgacagcattttcctttgccgtctgctggtggattcctattcccagtcggtaatcgccccgcagtgttgatctaagaaggtaaagaaaactaggtttccctgcaaagagcctcccccaaatcggcggactccggatactttgagtggatttagaaatttatgtaatctttctcctttagtttatttttcatcctctcctacagttttctctgatttgctgttggttcggggcaagataaagcagccagtagagagcgataataatagcggcgggaaatgaactggagactggctgacagttcttaacattttgtcatagatccccccgaatgtcccaggctgtctctggtgggttttagtacccgccggcttcttgggcaccggggaccagaaggaacttggcagctggtcttaggggtacagttaaaggcaggatgacagctattctcctgctcatctcagagcgctgccgccccctcatgccggtcgcgcaaagaacacagcttttaaaaaacacgtgccttctgcccatataggtctgaaagtgatgaggaaagtaatgcttcgcctattagcgagtttcagcttttaaaatgatcccaagcgttgctgagatgagaaagcgtggcatncnccnngggggtcctcagccccacccgcgcccatggtgcaagtctgcagggacaggcccgggacagcactgcccacgctgctagattttccgcagaggatcgctgaagctgccttcgt

SEQ ID NO: 52 - DNA, 2420 bp, Homo sapiens
tctctctcctcgggatgagcagggagagcgcgcggaggttcccgactccctcgactacaaccaagaaagaataattttcaaagtgttcaacatccccgcccccaagctccccaaaacacaggggcagggaacaccaaaacactcggctctcattaggaagatcacggctctgaaaggaaatagtagacacgatacttcatctcatctggatttatgaccaaaaaaacaaaaacaaaaacccaaagagttcgcttgcattttttccttccaaatctcggttcggctcgaaggcagggaatctaaaagaccgaggccgatggaagagagccagcggggcgagcgagcgggcagcctccctttttgcctcccggagttacccagaaggacaggggaagggaaggaagaagaggcgaggaaaaagaggagggagggaagcggaggccaggagcgacggagcaaggaaagcagtttgcaagcgagaaaagagggaaaaaacacagccgcacgaatccagagagatcacaagccgtacgcaagcagcagcagaaagagcgagagcgcgagcgcgcgtcctctccgcggtctggggccagacagcccccagactagcccgaatcaccccccaagcactgtctcgtcctctctgctccggccgccccctaattcccctccttcctctcctccacctcctttccaaaaaccaaaacaacacaagggagggtggcaaaagcctccccaaaccggccgattcactcaaagacaacaataataataataaatacataacaatctatatcctatggtgggagagacgtgggactaatcttcggcatttattttaacacctgacagctagaataaataaatatatacatttatatcaatagatacacatagaaaacttggagccaaagcatttggcaagagcggaaaaaaaaagaattaaaaggtaaaataatgatcatgagcagcggcggcggcagcggcaccagcggcaacagcggcggcggcggcagtagcagcagcagcggcggcagcaacagcaataatcacctggtgtccggcctttcctagaaacttcttgcatcaccacttctaagaaccccagttctaagaatcaacagagctcaattctcggaatttgagcttcggactttaccactgctacgtggcaggggaggacttggtgtcagctctccgagatttttactgcccctggccaaccaaaagccctcaaagccacaagattttttcactggccggcatatttcgaggtcctcataagcagagcgtctcggatttggaggttccggttcgaggctcgaggggcctgaaggtggctctccctccccgggcccaagacgatggtatggcctgctccgccaccatcacgtgggctcctcctctgtgacgtcggcgccttcgctgtagcaaagctcggcctctggaattctgagaactaatttgctattcggtgacataagagggggagtgcgctttgctttcccggggtctggggctaattccttctttcttacccataaactcagcagatcgagctaaatgcacaaaagggagcgagaggtttgaaccactgggaaaagtatgttatatatatagtagggttagagaggcgagtaagagaaaaataaaataaaataaacatcacagctctttccaactagaatattaggcaccacgagaaaaatatttgccaagcagttttcggtgggttcatttgctttatttttatttaggacaggggtttttgctgttgttctgggtttttttctttctggtgtggtggcttgggatttttggtttctgtattttgatggtttatggatttttgcttctgattttttgccttttgcaagtttgtggtgttacgtaaatcacaggatcggcatcggttggatttttttgtacgtgccttttctttccctatctaatccctcaagcgttttaaagatgtattatttcaatactaatactattgaaagaagcttaaatttttggccatatgtaacaatcccagcccccactttttttttttttttttcctttggtgcaattttctttttcccccttggacttttgctgaagtgtgtctctcctgcacttcagagaaatgttcaaaggatttgttttggtttggtttgtttctttccaggacagcaagtggtgggtttaatctgttattgttgactcttgggaaatttcttgttgcaagaaacgtgtgtgtgggggggagggtgggggtggcggggtggtatgtgtgtgttttctacaaaattctgtgagccaaatacctgtttgtgttttgttttctcttaaggtcttgagatttttgttttcgaggctcgtttcaaggtcgttgtaaaaaaatctcttcagtctgtgtttaagagatcagccgg

SEQ ID NO: 53 - DNA, 2344 bp, Homo sapiens; identical to SEQ ID NO: 42

SEQ ID NO: 54 - DNA, 2366 bp, Homo sapiens
tctccttcttctcctggcagaactgctcgatggccttgatcatgcccaggcccatctcgatgcagcagtaggcatggtcggcccggggctcgggacagcccgccacgcagtagtaacagtctcccagggtgctgattttctcacacttggtctcctcacacaggcggtcgaagcgaccgaacagatcgttcaggagacccaccagggcgtgggcagacttgttggcactcatcttggtgaagcccacgatatctgcaaataaaatactgacttcttcgatctgctgcatcttaaaagggcggaaggctataggagctttttggatggaagactttttcttcctgttcttggggctcgaggtggcatgcctcttgacagaattctcactctcctcatctccctgcttcattaagtcatcggctatgattcttggcatcacggaatgaatcatcctctctttgagggctttttccacttccaggtccttcccgtgcataatggattgccccaccttgaggaaggtgctcctggacctcacctgggacatgacgaacaggtggaccccgatggcgtggatgcagccgtggagcagccccctgctcagcagctcccagtgcagggccccggctccgggcgaggggaagcaggcttcatcccggaaatggtagccaaaggtctcgaaaaggacagagtaggccacccccagacacaaactcaggtacaaaggtaagtgcatgacggtatagagcaaaaagagcacttcgatgcacatggagaagctccccacttgagataagcaagtatctgtgggccgggctgtggccgtaaggttggagctgtcgccgcgtcctgagacaggcgtcaagacctggaactgcgcagccagggtcagggcgaacaccagcagggtgagagccagcgaggtccacgcgtaatgccgggcgtacagcttggtgaaggtaaacagaaagaagcccacacacaccaggaggaagcacagcgcgggggcgaccatgacgatcagtctggatctcatgtggaccgcaaaatagatgctccacagaaggcaggcgaagccgatgtagaagagcgcataccggaaccggcgctgggtctgcgggaagcagcgctccaggcaggcctcctccaggttcaccgagtcgaacttggggtcccaccagcggctggaggccctctcgaacagctggggcagcttcttctgcctgcgcagccggcctccgccgcccactcgccgggggacgcccccggagtccccagagctgctgcagctagaggagatgctgtatttgcagtgcttggggtggctgttggaggacagctgcttggggttgatcttgacgcgcacgctgttgctgtccccgctggagtcgcagctcacctcggtgctgtggtgatgcagcagctgctggtggggtggggaagccatgttgtcgagtcccggggcctgccccggccggggtcaccagtacctgccagcaaaacggggagagttagcggcgctcccacctaggcatgcacgcctagaggcccgggacctgctcctgtcctaaggggcggctccagcacgcgacctggacaggcaccatctgttcctgtggttcccggctcagcggtgctcccaccgcccccaccgcccccaccttcgaggcgcacgagaaccgctcgggacggacctagaacgcccgggggtccccgccgcgtggccgccgtggctccgggaccgctttgctcgctcgccttccgcgcctctcgccccgagggtggcctccgcgccgcgcggcttctcctcctcgcgcgctcgcctcctccagctgcggctccggagggaagttcagaccttgagcgctcccagccccgcgagccgcctgcgcacaaacaactccgctggcggcgcggagccctccatcctgcaggagccgcgctccgatgcgtcaaaggcggcgcgcggccggccccgggcccggaccccgacccggagcagcgagcttcggcgggcgcccccggctcgcgctccccggccgccccccgcgctccgggccggccctgcccgcggcggcgggcgctgggggtgggggcgccccgggctgcgagtgcgcggagcccgtcggcgcggcccgtctagtggggcctgcttccccccgagtgcgccgccgctcccgccgcggccgcagctgtcccgggaccgagcgcgtggaaccacggacgcgggcccctcgccgggcggcggtgcagacgctgccgcagagccgggctcccgcgacgccggccgggacgcccgcccgcccgcgcccacgccgggggccgcctccccgagctagagatgcggccgccgccgcgcccgccgc

SEQ ID NO: 55 - DNA, 2264 bp, Homo sapiens; identical to SEQ ID NO: 19

SEQ ID NO: 56 - DNA, 1334 bp, Homo sapiens
gggcgccttgactctccctccaccctgcctcctcgggctccactcgtctgcccctggactcccgtctcctcctgtcctccggcttcccagagctccctccttatggcagcagcttcccgcgtctccggcgcagcttctcagcggacgaccctctcgctccggggctgagcccagtccctggatgttgctgaaactctcgagatcatgcgcgggtttggctgctgcttccccgccgggtgccactgccaccgccgccgcctctgctgccgccgtccgcgggatgctcagtagcccgctgcccggcccccgcgatcctgtgttcctcggaagccgtttgctgctgcagagttgcacgaactagtcatggtgctgtgggagtccccgcggcagtgcagcagctggacactttgcgagggcttttgctggctgctgctgctgcccgtcatgctactcatcgtagcccgcccggtgaagctcgctgctttccctacctccttaagtgactgccaaacgcccaccggctggaattgctctggtaagtccagaacccccgtccccgaccctttaactccgcagaagaacacgcgtatccagcacagaccagcctaccctagcgcgcctcctcagcccctcacctcctactgccctagacccctaataccacccacctctatccagagaaacaaggggaactgttgcaggcccgggggtgaggggtggttctgggatgggcagaaagtgcaggtgtagcaggaaacctttgcatgcttgcgcttacattggagctgcgaggattttgagaaatattaaacgggatggttttctgggttcactgttttgaaagagcaccaatcctaggggaaacactgaaacagaagctttgtcatcattaaagaaaaaagtcttactaggatgaggaagaaataactttatgagaaagaatgagcgagaaagcaataaatcaaatggtgactgcaggggaatcgctgattcctggcaaaggtgccatgaggtcgcactggtctcccgttgaagaccaggtcacacagattctagaggagctgggtttcaatagaatttctctctctctctctctctctctctctctctatctctctctctctctcattcccttctctcctaggcggcaaaagacattggttttgcagtccagatatgcccctctctttgcttccctaagcttcaaggtagtacaggggagttgagaaaaagaacactttgcgggtctcccaggccggagtgggcatgactgaggctggtcaggctccatgtaggcgagccgagggcggaacccgacttcagtgggcgctgac

SEQ ID NO: 57 - DNA, 2501 bp, Homo sapiens
tctttgaaaattgctaataaaaactcgctggttttacggctcagggggcatcacggaacctgcggacatgtgatgtctcccctggacacccggctttaaaatgtctctcttttgtactctttccctttatttctcaggccagccgacacttagggaaaataggaaaggacccacgtgaaatattgggggctgaatttcccccgataataagtctcttaaaaaagacttttaaatgaaatttctttgttttttaacttttatttctgttttgggggtacatgtgaaggtttgttacataagtaaactcgtgtcttcggtgtttgttgtacagaatatttcatcacccaggtattatgccgagtacccaatagttctcttttctgctcctctccttcctcccatcctgcaccctggagtcaaccacagtgtctgttgtttccttgtttgtgttataagttctcatcatttagctcccacttacaagtgagaacatccagtatttggatttctgttcctgcattagtttgctaaggataatagcctctagctccatccatgtcccacaaaagacatgatctagttctttttaatggctgcattaaatgaagttttaaagatacaacataaacaccaacctcttccccaccacaaaaatcccttgctgaatttgattacacttaaattaacgagttttgtttcatgaaagactccttggacaaacttgacagttgatggaataggagaagctgtctgtcatgtctaaagccaacaagagatcaatatctagaataaatggagatctgcaaatcaacagaaagtaggcagcaaagccaaagaaaatagcctaaggcacagccactaaaaggaacgtgatcatgtcctttgcagggacatgggtggagctggaagccgttagcctcagcaaactcacacaggaacagaaaaccagcgagaccgcatggtctcacttataagtgggagctgaacaatgagaacacatggtcacatggcggcgatcaacacacactggtgcctgttgagcggggtgctggggagggagagtaccaggaagaatagctaagggatactgggcttaatacctgggtgatgggatgatctgtacagcaaaccatcatggcgcacacacctatgtaacaaacctgcacatcctctacatgtaccccagaacttcaaataaaagttggacggccaggcgtggtggctcacgcctgtaatcccagcactcttgggaagccgaggcgtgcagatcacctaaggtcaggagttcgagaccagcccggccaacatggtgaaaccccgtctctactaaaaatacaaaaatcagccagatgtggcacgccacctataattccacctactcgggaggctgaagcagaattgcttgaacccgagagcggaggttgcagtgagccgccgagatcgcgccactgcactccagcctgggccacagcgtgagactacgtcataaaataaaataaaataacacaaaataaaataaaataaaataaaataaaataaaataaaataaaataaaataaaaaaataaaataaaataaaataaaataaaataaagcaatttcctttcctctaagcggcctccacccctctcccctgccctgtgaagcgggtgtgcaagctccgggatcgcagcggtcttagggaatttccccccgcgatgtcccggcgcgccagttcgctgcgcacacttcgctgcggtcctcttcctgctgtctgtttactccctaggccccgctgggacctgggaaagagggaaaggcttccccggccagctgcgcggcgactccggggactccagggcgcccctctgcggccgacgcccggggtgcagcggccgccggggctggggccggcgggagtccgcgggaccctccagaagagcggccggcgccgtgactcagcactggggcggagcggggcgggaccacccttataaggctcggaggccgcgaggcttcgctggagtttcgccgccgcagtcttcgccaccagtgagtacgcgcggcccgcgtccccggggatggggctcagagctcccagcatggggccaacccgcagcatcaggcccgggctcccggcaggctcctcgcccacctcgagacccgggacgggggcctaggggacccaggacgtccccagtgccgttagcggctttcagggggcccggagcgcctcggggagggatgggaccccgggggcggggagggggggcagactgcgctcaccgcgccttggcatcctcccccgggctccagcaaacttttctttgttcgctgcagtgccgccctacaccgtggtctatttcccagttcgaggtaggagcatgtgtctggcagggaagggaggcaggggctggggctgcagcccacagcccctcgcccacccggagagatccgaacccccttatccctccgtcgtgtggcttttaccccgggcctccttcctgttccccgcctctcccg

SEQ ID NO: 58 - DNA, 2327 bp, Homo sapiens
ccccccaccccccccaccgccacccttgcctccgggccactgcccctctctgcaagctttgtccgctggactccgttgcccttgcgcggccgccccatcactcacgcttgactggaggaaataaaattggcgttggctttttaattccaagcttcgtgcttgattgggggaggggttatttaggtattttttttttcaaacagaagaaatttaggtactaattgtaaacaccccgttgctcttcttgaaagtatgtatcatattagccgaggccttggagacacacggcctattactcatttccagcctctaggcaaagaattctatggagatccaccagtaaaaccagatttcttaagggaaattaccaggacgtcttcagactctcttcaagggatattactggttgtcgattacacttgagcacactcttctctagcccacccctaccattttattttgggatcaccctaaggaaattagccatttgcagaaagcttgaaatcccgaaaggagaggcacaacctagggtaaaagagaccgagtgaagcttttcagattgattgtctccactggggccacttttcataaggtcgggagtggagaggagtgtctgcagaagagagactacctttaaaggggctctcccgaactcaggaggtgagggggacttcctagagttgtcaccacctgtaggtggatttgtcatcactatgtagtgtctcctggggagccagcctgttctccccagagtccccctcaggtactgtcccagagttcaggggagcctttagcgctttctccgtttgccctgagggtattgcatgtacaaaagctccttcacgcgcgcgcgcacacatagacatccagcgggtttggagtgtacccctgtttatttgtcaccacgtggtaaaccccagatttggaagtcatcactatgcgggcgcgcatcaggatccaggggagactgtgtggggttgggactgcgcacaaacacaggggccgcacggaagccttgcatattttaaagtgtaacctgagccttcgcggtttcagcttcacttaaaacatgcaaattcttgaaattgaaaaatctgaaaaacttccgaagagttctatctgaataaatccaaatccattgggagtcgctttgaggagacaaaacgcacagcgatttggggtgagggatatttgtggggaggcaggacgtgctggattgggtttccagggtcaaggtgtctctgggccttcgacgatagccttagcgcagagcagggaagtggcaccgctaggcagcaagctcagttgctctacttttgtgacccatgagccagtcctgaggctctggcttcagggcctagtttccatttatgccgcgtttttgagagtctaatactgtgtctggcacatggtaggtgctcactgaatagtcgtggtatgaatgaatgaacgaatgaatgaatgaatgaatgaatgaatataagtttaatgggggaaacccgggcctcctaataaaggtaggggctgggggatacctaggggcttccccaggaggatttcttttttcatcatcccacccctgggagaaaggtccacgcaggatggtcgcttcccccttgctgagagttttgccttcagcctatctgggccgctggaaaagaggagaagaataaacaagagacaagcaactactcccctaccggcgttccgtccttgtcctcactgccaaatccactccaaagccgaggatggtgagactgtgaagttgcaaagaaacacagagcccacccccttaaagaattacgatatatttaaagtttgcctctttcaggtttctctccttggctcctgcccctttcccctcccggctccttgtccttgactgaacctcatgggacagagaacctcctgtcccccacgaggcaaggcgcgaacccgcagagatctggggtgccctttggttccctgcgctgccctggaggcgtccatagaggcctttgccgccaaggacagcaattgttttattttcgatggttgctcgccaggcctgcgggtcgcgggcccacccagccgtcgaactttccagtcgttatcagcgctgctcctaacttaatggaataatgcaaattatagcctgcccagctgacacgtccctgcgaatgcgccggggctgagctctggccagccgctctctcgacgtcctggacggccggagggaatgaagctctgaattgtgacaaaagtggggggggggcaccccaaattctcaaagcaatgttcttttttttttcttttttcttaagcaattgagccttaccaaatgtcgg

SEQ ID NO: 59 - DNA, 2494 bp, Homo sapiens
tttctatgaagttacaaagctgcaatcccgttctcatgtgcagcaccacaggttttgctttcaaatatctgcaggtgcatcctcctgcactcgttaaactaagggttttccttttctgtgctagacccgcttttacgaccacgctctccacctgattcacagaaagggttctacgaccgtcaggtcaccgccgcctttgtactttattggggagtcgaaggcctcagcgctgctcgcgatttccctaaggtggtcgggaaggtcccaaccacgttcttctgtaaaccagataaggaaggcctggggattccggccgcggaaaggcacagaggaggtgaacgctccggatgcccaagtgacgcacttgtaggcggattcggaaactcgtgctcttgagccggaggcggagcccccagactcagaccgaccccccagaaccgggcggccttgcccgaggcatgaaggctttctaggcccgcttctaaaagctgtgtacaatggagactcctggaataggcacatatctctactgtaatcagaacgagatgtaacatctaagacgcagggcagggctctggcaaagacacgctgggggaacgtgaaagaaagggccaaaactacgcagctggtcctcagagaccaaagactacgacccccagcattcaatgcagtgaacccctaggacgttgcatgccgggagctgtagtttctcaccaccgccacccccccgcccccccgccatctgaaagggttctaggggatttgcaacctctctcgtgtgtttcttctttccgagaagcgccgccacacgagaaagctggccgcgaaagtcgtgctggaatcacttccaacgaaaccccaggcatagatgggaaagggtgaagaacacgttgccatggctaccgtttccccggtcacggaataaacgctctctaggatccggaagtagttccgccgcgacctctctaaaaggatggatgtgttctctgcttacattcattggacgttttcccttagaggccaaggccgcccaggcaaaggggcggtcccacgtgtgaggggcccgcggagccatttgattggagaaaagctgcaaaccctgaccaatcggaaggagccacgcttcgggcatcggtcaccgcacctggacagctccgattggtggacttccgcccccctcacgaatcctcattgggtgccgtgggtgcgtggtgcggcgcgattggtgggttcatgtttcccgtcccccgcccgcgagaagtgggggtgaaaagcggcccgacctgcttggggtgtagtgggcggaccgcgcggctggaggtgtgaggatccgaacccaggggtggaggcggctcctgcgatcgaaggggacttgagactcaccggccgcacgccatgagggccctgtgggtgctgggcctctgctgcgtcctgctgaccttcggtgagtgattctggaggagcagacgtcccccctccacacacgcggccgcttctcgaaggtcctgggggcgttgaacgtgggaggggggatcccggggcctgcggtgggccaagggacgtcaccattcctcgaaagagggcaagggaattacgtttattctcttcttcctctggaaataaaaaaagagagcaacatcatctaactgccctacagatctaatagtatctcgcccggaggtctcagcgacctcggggtggggcctctctgaggctctggctcccccgggagctgtgcgagcccctcccccctccccgcccggaggactttttcggccaccgcaaccttcggccatcccagctttcccgtcccctaattccccagactccgactcctcgcaagcccgtgtcccttcttagatgctggcctcgggagcgtgaggcctggggccagcggaatggcagtgtcagcgtgtttgattcagttttgctggagttcggttcttaacatttctcccccttctcatgcctctgggctcaatttcagttcccctcgccagaggttgcataaatcctatttgcattctgacctgtgctaacgaaggccgaagttttggcttgatcagttgggaggccttggctcggcctgcgcgcaacacgtgtgggtgtagaagaggcctggtatcagtctgcttaacgttatttataaatgatcggagacacactgtttagaagtggtgactgcctccgtatttcaggatctactggagacctcagcatctgaacttaaatagatgttctgtcttggctttacctttggtatttaaaccagggaatgcactctttcatccccacctcccttagttaccaactgaattttgcaacccctacccttccctatttgatcatcctccttggagaagtgtgatgttgaagagtttgcccgtgttaaatcttcagggtcggtcagagctgacgatgaagttgatgtggatggtacagtagaagaggatctgggtaaaagtagagaaggatcaaggacggatgatgaagt

SEQ ID NO: 60 - DNA, 2497 bp, Homo sapiens
tgaagactgtgtggagtgggaggtctgtgcctatttttctcattcattggggaatgggctgagtggctgggggcaaagtgggactcaggggctctgcccagtccttactgcaggctaagccctcccttgcggccaagagccactgggccctccacctccctctggcttctacccgcagatctagatggtttcatggtgactcagaggaggatgcactcgggcgtcccttttgaggatggctgcagggaccatccagggactgagccgaggtgcagatacagccacggatttgggtgttgttagacacagaagggtgtgtagcaaagtgagccccacgcatgcgtagactcttccctcggcttctgctctccatggaaacacaactgatcacatcatgattgatcacggtagccctctagggctttctttcttttctttttttttttttccagaagtcataaagggatatagaatatactcaaagaccacctcatgcttttagtggagaggcaaaaaaggttcgctccggaatggggaagcggctgcgccctggacggagaggggcggggacttcgcgactgcaggcggagggagggcgggtgtcgctggcgcaggcggtgacagggagacaccgccgccactgagtattcctatgcaagtttcttcatcttcctgtgcatcagtgtttacactggggtaatgataaatgctgtgttgaaaaattatttgatggggccatggaaggaacggaaggaacggcgtcctggcccgctcggggcccgcgcacgccgccaccaagccgcgggggcgggtcggaggggagagttgcgtcagccaggccgctgtcagatgacgagcccggggcgtgacggggtggagcatccccaaaaaagtgcatgcctaggatcccgcccagtgtatccctgcgcgcggcgggccgggctgggcagctttataaacagccgtggtgtgagcctcgaagggaaccatcagcgcctcctgtccacggagctccaggtctacaatggcagcggccgccagccccgcgttccttctgtgcctcccgcttctgcacctgctgtctggctggtcccgggcaggatgggtcggtgagttcggggatgtagcctaagcagggcgggggccaaacctgggaggttgtggactgcagcgggtttcagaggaggggaggcttctggaaggaccggcgcgatctccctgaacgaacatcgcggtctccccgaacgtcgcggtccctccgaacgtcgcggtctccccgaacatcgcggtgcccccgaacatcgctgtctccccgaacatcgcgatctccccgaacatcgtgatctccccagacatgcccagctgaaggcactcagttcccctcggtggctcctttccgccgggtccgcttcctgcggctgctgcttgcccctcaggccaggaggtttctggaaggaccggtgctgtctccccgaacatcgtggtctccccgaacatcgcggcctctccgaacatcgccctctctccgagcaacgcgatctccccgaacatcgcggtctccccgaaaatcgcgatctccccgaacattgccatctcaccgaacatcgcgatctcgccgaacatgcccggctgaaggcactcagttcccctccgcggctcctttccgccgggtctgattcctgcggctgctgcttgccccgcaggccaggaggcttctggtagcaccggcgcgatgcccccgaacatcgcgttctaccccaacatcgcgatccctccgaacatcgtgatcccccccgaacatcgccgtccccccgagtaacgcggtctccccgaacatcgcggtccccccgaacatcgcggtacccccgaacatcgccgtctccccgtacattgcgatcccccgaaacattgcgatctccccgaacatcgcgatctcgccgaacatgcccggctgaaggcactcagttcccctccgcggctcctttcctccgggtccgcttcctgcggctgctgcttgccccataggccaggaggcttctgggtggaccagcgcgatctccccgaatatcgcggtctacccgaacatcgcggcctccccgaacatcgcggtctccccgaacatcgcgatcccccagaacatcgcggcctccccgaacatcgcggtctccccgaacatcgcgatcccccagaacatcgcggtctacccgaacatcgcggcctccccgaacatcgcggtctccccgaacatcgcgatcccccagaacatcgcggtctccccgaacatcgctgtctccccgaacgtgcctggctgaaggcactcagttcccctccggggctcctttccgccgagtccgcttcctgcagctgctgctagcaccgcagtccagggggagtgtcaaagaaggctgaaaaggaattgcaggagggtggagggaccaaaaggctacagagggcaaggtagggcggggatccctggtgcagacccgcagccccactg

SEQ ID NO: 61 - DNA, 2455 bp, Homo sapiens
ggaccctccattccggctgcagcttcccgcgcagtgagaaggcagcggtccctgagagcccagcagtgccctgggagcctgcagaacgcaggggcggattccgcgtcgcactggccgtcaaggggcggccgcggagggaaggggtgggtcggtgggtctgacagcgggtctgcgtaggcggcagcgtctgtccctcccagcctctcgctccgcgccatgggcgggccccgggctctgctggccgcactctgggcgctggaagccgccgggaccgccgcgcttcgcatcggagccttcaacattcagagcttcggtgacagcaaagtgtcggaccccgcttgcggcagcatcatcgcgaaggtggggcccgggccggggcggggcggcgtttaggggtgctgaccgcgctgacccccgcacccgccgctcctccccagatcctggctggctatgacctcgcgctggtgcaggaggtgcgagacccagacctcagcgccgtgtccgcgctcatggagcagatcaacaggtgtggtgggcagggcccctcgtcgcgaccccccgccgggatctcgccccggcgcggcgccccgaccctgagcgggcccctgtctccacagcgtgtccgagcacgagtacagctttgtgagcagccagcccctgggccgggaccagtacaaggagatgtacctgttcgtgtacaggtgaggggcgggccgcagggaggggcgcgcggggccgcaggtcgggggctcagcgggtcctccccatctcctaggaaagacgcggtgtcggtcgtggacacctacctgtacccagaccccgaggacgtcttcagccgcgagcccttcgtggtcaagttctcggcccccggcaccggtgagcgggccccgcccctcccctcccgccgagctctgacgcccccaccccttcccgcagcagcacagaacctggtgctgatcccgctgcacgcggcgccgcatcaagccgtggcggagatcgacgcgctctacgacgtgtacctggacgtgatcgacaagtggggcaccgacgtaagcccacccctcggtcccggggtccctgcaggcgcgccccgggggtctggttcatgagggcgggacctcgacggctcctgcggcggctcagacacggctccgcggcgcccgcaggacatgctgttcctgggcgacttcaacgccgactgcagctatgtgcgggcgcaggactgggccgccatccgtctgaggagcagtgaggtcttcaagtggctcatccctgacagcgccgacaccacggtgggcaactcagactgcgcctacgaccgcattgtggcctgtggcgcccgcctgcgccggagcctgaagccccagtcggccaccgtgcacgacttccaggaggaattcggcctggaccagactcaggcgagtgggccgtggggcggtgctggtcttgggtccccaccgcccgggcgcacgcaggcagcagggagggtccagcgcccaaggcagggccacctcagcttcctccctgcaccagggctcgtttccaaggaccctggagagcccggcccaccccatgtggagctctgggcaggcagggtaccttgcctttccctcaaagggccaatggtgacaccctctgccccggcccctgcccctgccccaccgcaggcagcagcaggggtgggcacccaggcctcaccggcccctcccatccctgtgggtggggtgcacttttcccctgaggttcactctgtccccacaggctcttgccatcagcgaccactttccagtggaggtgaccctcaagttccaccgatgactcgaggcctggctggggcatgccacctgcagaccctggctctgaggaatggcccaacagtggccccttcagggtggcagccacccttcagtgaggccccaaggcagagtcggctgggcgtggaccaggggccatggacacgtgatgtgctgctctgtacctccgttccccatctgtgggacgggctgcatccagcgacctcatggggtgttgtgagccccatgaggggtgcagggggcactgcccggcagatgtctgctcaataaatgagctgctcccggtcgggccccacagcttggctcccaggcctctgtccttcctcaggacccagcctcagctccttaggggcagccatggcctgggctgcccaccccatgtcctggtgggacgtggctgcccccggagcctgctggccccagaaggcagctcagggatgctccttgctcatcctctgtggaaactacaaacgctcccaggagcctgtactgtgagcacagctgggacagggatggcgccaacacaccagcctcctgggccctcggggctctcagaacagctctccccaggcccaccccgcagcccccattccagggccctgcaggggcccccaggcacttgtctgtctcaagagcccggt

SEQ ID NO: 62 - DNA, 2738 bp, Homo sapiens
tgtattgttgagggtcaccgaccaccgagaatcaggttcagttctcagaggaagcgccagaggagggggagggtgggcgagggtctcggggtggtgggggtgccggccccagcatgtggaggcgacaggatccgtaagaccccacgcgccgccggggcaggaccgcacagggccgccattcactcacttggggcgtccctaatgggcactcgtgcattccagctcgtgcggtgagcgcacgcacgccgccgctgccgcgttcacacggccccccaaagtcgggggaggggtcgtggagcgaaggagctgtaggcagattttctttctctttccgagctgggaaaagggccagccccgtgccctgcacgcctggctctgctttgcagcttgccggtgagccaagagccggtagagcagaggaggcgcacggttcgggtcgtgtcaccatttcttggcttgctgacctggccaggagctggggatggcggcagcaccgcggaggtacgctttgcgctgccctcacgctcccttccgaaagcagtgcccccagggggaaagttcgcaatgccatttgtctcgccggcaaagttctgggatgtcgggcatcttttgaggagggggaagacgcggcacccttactgaggccggcaggccaggaagagaagttctccgggcgcagggcgcagcccagctccggggaccctctgggcctcccgcgtgccggccgggatgaagcgcgctttgcaccggacccgggattcgggggcgggggctggcgctggcagcgtcagacgctgcttcatttcccctcgaccctggggaggacagcaacaagtcctgccccagccatttcatcaccctgctagcacgtgcagattccgggccctcggagcccggcgcggacctcgccttgcctcgcgcttccctttgcacgtcccgtgccatcccaagagtttgcgtggccctgggtgggcgcctggctcccggcgaaacgcctggggcgcgccgcgtgggtgcacggtgtcctctcccagtagctcccggctgcgggggcacatgcacttacctgtattctgcagggacaggcggcctttctgctgggagctcctgtcttggggaccctcgggtgggttggtggcgtcggtcccccgcgccgggtcaaaggtggccaacaccaaagccagggtcatgaactggcccagccgctcggcacacatggttcttggtattaacctcccgtcgggagacctggatcctttgtgctcccctcttcctcctcctcctcttcctccttcgccgcttcccctcctcctcccactcttcctttttgctcgccttttccctcctcctcgcggccgcggctcggatagaggttacccagcgccctcccgtagctctccggagagcatgtgaccaggccgttagcagcgccgcgagtgcccggcaatggcagggatggtgcctcaaatatccctggaagctctggtgtcacttgaatgaaggagtcgagcaggtgttgtcccggcggctggaccaatccgagaccccggcccttttgacaacacggccgggaggcggggcctgcgctcaactactacaggaggaagccgagcgccgctgggagcgccggacaaagttgccgacctggcggcggccacgcgtttgcgtgcgtgtgtatgagtgtgtgtgagcgcggccggagatgcgtgcgcgtgtgcgggtgctccagggcaatggtcgaaaggactgtacaatataagagcgaatccaagctccagttgctgttaaagggggacggtgtgctctgggacagtgtccctggggcccctggctcgcgtcacacccacatcgggttgggaaagtttcctctttccgccgtttggaattcagtgagattcccagcccagaggacttgataaattgaagcagtttcctaggcacaatgatgctgtgggccaactgagcacacatgggaattcctggccttgtgacactttgcattaaaaagaaccccacgattgaagataggagcagaagcactagatacagtatttggtctgagcaactgccctatcttcccgctttggtgggccgtgcaacacctggagtgtcgtttctcgtctttcccctaatccagacgcattccaggctgggctgcagggatccaggtgacagtcaggacttgcatcatttccaggagggtggcagggaggcccaaggcagccctgagtcagcccgccgcggagcatcgcgtgcccggaggccagagcttgaaaggcaactttacgcgtctccaaacacactcctgcattttctcaaagcgctgctcgccaccccgctccgggttcccttttactctccagtcatccgatggaagtggtgagaacaaaaacaaagacaaaaaagctaaatccggggaagttatctccatctcctcccttttcttgttcggccccctccccaagaaccgccgggtcgggatagcccccggctactttctcacccggcccgtggagggaaggagaaagttgggcgccgcttggagcgcctcttcccctgctgtgtgtgtacgtgtgcacgctcacgtctcccccgcgccggggccggggacaggaactgctctcggtcccgtcaccccacggcgcagctcggggggctcgcagggctgggggagggcggggacacgagcgccgcgcccaagcgccccagggcacgcacccggcgttggcgcgcactcg

SEQ ID NO: 63 - DNA, 2401 bp, Homo sapiens
gcggcaggcgaggcggggtgcaggtgtgagtggggtgggaggaaggggaaaggatcggggtcgccgcagcctttctggtcagtttcgctgggttttgtcagttccgtttgagaccgaggcgcacggactagcggccgccagcacctcacaggtggaggacacctcttgcgccccaaggtcaatgtcatcccgatgggtcccgtgccgtcctgactctccctgacctaattctttggttatgactttctcaccttctgggcttcgcctctgccagctttcgccgacgtcgcccttcccgccgcccgcccgggccttcctacccgctctcctccctccctggcccgacggtcccactgaggcaaaaacaaacagccctgagggcacttcaaggagcgtgcagtggccccgacggtactctcggggggataaaagaggtggccagccacgccgtcggcccccggccgaataatgggcgcgcagcagattgccagggggcacttgaaactcgaggggagggaaatacttgagcgcggtccctccccgcgaggacgcacgacgcagcctcgcggatcgtcccttgttcgctctctttcatgcactctccttttgtgtggaattatctaaacgggagatccctggcagctttatgctaatgcgccgaacaaaggcaacggcccgcgggcgggaggcccggaaggtgcctggggccgggccgggcggggtggcggccaggcgggctgcgcgtgtctctcgcgtgcccctgggactgacacaacaacccctcattcctgcaaatacaaagcctctcaccggctcgggtcgggcgcacccggcgcagggaggcgctggtccctccgggcggcgggcactgcagcggtaacgcacggttcctgccggttgtggctcgggggactgagggccgggagtgggggcttctgtgaagccagaagagaagtctgcagcagagtggtgatgaggggcgctgacacctcacccccaacgccgacgtctccaaacgcgataccctctgcggggtgagaatgcgggcccgcccggctcctcccgtgaggccagggcctcctgttctcctagacaccccaaggagccaactcctccgcagaagttccccgcttctgctcttatttccaagcttcgcgctttctacaaactccctgttgccttgactttgatttccagccgtggtgagggtcagagtgaaccccggcgcgctccccgacggcatccccgcacaccaggataggagaaattggagggcctggggcctcgggctccgcagtcgtcggaggaagaacccaccgcggggtccgcaagggaaagtgaagaggcccgggatttttccaaagcgctggccaggaccccgaaggaaggggaggagtcacctgaagccggggaaggccccttgggtgctctgccttggatccttatgttcactgactttcgcgaagcccccctggaggggggcaaatccgcgctgtttcccccaacttaacttcacgcggcccattctccgaatcgcgtgcgccaaggccggcgtcgggggcgcactgtgatggcgctttgctcttcccaggcgaagacaaatatctcgacccgatgtccccatgcatgcgggtgcacaggttctgagaaaatcacgcagaaggcggctgcgatccacggcccgggctgggctacacctgcttggaggtcgctggtgtgtgcgtgcgcgcgtgcgcagcctaactccttccagccccgggtggtgaaattagtttccaatactagtacctttcaagtttccatttattttgactgtacccgtctgaaagcagatttcatttacgctagcaagactggaagccacaaataaagaaaaagaaacggattcattgaatctcagtatctcagtagcgtttaatagattcccttggctaaattcagagccctgtttgaattcactcacgcaggagttgttttgttttttttgttggtagaggtgccggtttcccatccccacggcttatttacaattatgggtgttgttatttttaaaggattcacaaggtgactaactctctgttatctgttgaatggaaggagtgttacatatgcaagaccgaatggggcaggccgagcccccgccctatgctattctacaatccagatgggattcgtgattagaaaataaaattggccaaagctgtctcggaatccttttcccacttctaatttcatcagcactattaatcagagctcaaaagagcaaggaaataacatcagttacttttagatagaaatatgtttataaattttagataaactcattttaagatttctaacttttggggagactagcactcaccacagcatttttaaaactagggtgagacttttcaaaata

SEQ ID NO: 64 - DNA, 2476 bp, Homo sapiens
aattactaggaggctgggggaaaagaggggaaaaacgggtaaggaaggttgcaaatgttaagatgccaaacaggaacccaaccgaagtccgaagtgaaatacagcctcctctggcccaactgtcatgcaaacaacttctaagcatcttcagatgtaaagaaaaacagtcattgtgcacaggcgttagctgaatgttcgagagttggatgaatggggaagacttgttatacacctagtggtgggtggatttcactaggctgcagcctccacacagcttttctttgctgcactgcagaggcgccatcttctccgtcttaatcttcactcaattcgatccttttatctgcaccctaaaaaaaagacccttcggaccctccccagcatcctgtgcccccaggggaactaaaccagagtccccagagctgccagggaagaggccgcgccttaatcagacaaacgcctccttggatgcacaggacagagcccgtgcctccccaccatccgccactgccctttccagacgcacatcccactctccgccttatttcctccccgccaaggactttacagcccagcacagaattaagcctcggaggtgatccgagggtgggaagcagaggggccccgaggctccgccagaagccccggcagcgtctctgccccctcccaggcggacgcgcagccccgggaagggagccgggcgggagcctcggtggcgcactgagactaacgcggctcggcccacggcgagggcggggtgtcgcggcttttgttcccgcggaccttctgcctctcagacagagcttagggtgcgagcgaactcccgggacgtccagacttggggaaggcgcggggtggctatgggtctccgacccctcccatttctcgcaagttacacaaaagggagacgcggacatgcacaaagtttgcctgtggaaggcggtgcgcgaccccgacgccggctcgggctagggtcgcacccaggctgccgccgccagcagccgcgaaaagaggttggagcaaggaagggggatgggggtgagagaggaaggtgaaacgaggcggagaacgcagggaaaagcgaggggctcctagcttcctgggctgtcccgactcctcctcctcctccccagggcccaagagaaaggaaagggcaacgattcaagagcgaaggactggctttagggacgctgcgttttcggttttccccacgtgctccttcccccttcccccctgtctgaatgtctctcgcctcccccgacccccgcttccaaggcagggactaagtcggggtctgggctcagggtcgccccctacccttctcgccccgggctggcgcggaaccagggagaccagcgcctcgcccgctccctctcagcgggccggagcgcgactccctggggcagggctgggccgaaagcggggatgcgctggacgtccgcaagcgggggcggagaggagaggggtcccattgacggacccccggcttctctgcattaaagacttgggttaaggtcttggggggtatcgcgtccccaccgtgcagcctccccccgccttccgaggcgcggcacccacctccagcgcccgagccgtccaggcggccagcaggagcagtgccaaaccgggcagcatcgcgaccctgcgcggggcaccgagtgcgctgctgtgcgagtgggatccgccgcgtccttgctctgcccgcgccgccaccgccgccgtctcccggggcccccgcgcacgctcctccgcgtgctctcgcctaccgctgccgaggaaactgacggagcccgagcgcggcggcggggctcagagccaggcgagtcagctgatccggcccaccccgctcggcacccgagagagacccctagcggcgccgccggggaactgcgcccgctcgcgccgggaggggccctcgcgccccgcgcccacaggtgcacgcgcccttggcgccgcctgcaccccacgcgccccctccgctccccggccgacggcccacctgggcttcgtgaacagtgggagggagagtctggggccaggagagggacggtgcaggatcagggaaaggtgagtcctaggacgctgaggctctagaaaagtcgagagcgctcctgctcgtccccgtgagcttgaatcatccgaccccgcaggcctcccgggggtgtcgtataaaggactgctgctagggtgcgtttttatccgcatttcgttttttctctcggtttggagaggtggggcaggcgtttctggaagagaatgagaacgagtgaagcttaaaggaaataggattttctttgcttgttgagacagcaaaacctcattttttaacccccaacgtcaaaagcaggcacgagcaacctggaatttctatctttagaacgaaccaaaggagcaaggcgcaggacctggcaaagaagcggccaacccatttacttcttcttgaaagcagggttctgggcttgggttttgtttcttt

SEQ ID NO: 65 - DNA, 2494 bp, Artificial Sequence
  Description of Artificial Sequence: Synthetic polynucleotide
tttttatgaagttataaagttgtaatttcgtttttatgtgtagtattataggttttgtttttaaatatttgtaggtgtatttttttgtattcgttaaattaagggttttttttttttgtgttagattcgtttttacgattacgttttttatttgatttatagaaagggttttacgatcgttaggttatcgtcgtttttgtattttattggggagtcgaaggttttagcgttgttcgcgatttttttaaggtggtcgggaaggttttaattacgtttttttgtaaattagataaggaaggtttggggatttcggtcgcggaaaggtatagaggaggtgaacgtttcggatgtttaagtgacgtatttgtaggcggattcggaaattcgtgtttttgagtcggaggcggagtttttagatttagatcgattttttagaatcgggcggttttgttcgaggtatgaaggttttttaggttcgtttttaaaagttgtgtataatggagatttttggaataggtatatatttttattgtaattagaacgagatgtaatatttaagacgtagggtagggttttggtaaagatacgttgggggaacgtgaaagaaagggttaaaattacgtagttggtttttagagattaaagattacgatttttagtatttaatgtagtgaatttttaggacgttgtatgtcgggagttgtagttttttattatcgttattttttcgttttttcgttatttgaaagggttttaggggatttgtaatttttttcgtgtgtttttttttttcgagaagcgtcgttatacgagaaagttggtcgcgaaagtcgtgttggaattatttttaacgaaattttaggtatagatgggaaagggtgaagaatacgttgttatggttatcgttttttcggttacggaataaacgttttttaggattcggaagtagtttcgtcgcgatttttttaaaaggatggatgtgttttttgtttatatttattggacgtttttttttagaggttaaggtcgtttaggtaaaggggcggttttacgtgtgaggggttcgcggagttatttgattggagaaaagttgtaaattttgattaatcggaaggagttacgtttcgggtatcggttatcgtatttggatagtttcgattggtggattttcgttttttttacgaatttttattgggtgtcgtgggtgcgtggtgcggcgcgattggtgggtttatgtttttcgtttttcgttcgcgagaagtgggggtgaaaagcggttcgatttgtttggggtgtagtgggcggatcgcgcggttggaggtgtgaggattcgaatttaggggtggaggcggtttttgcgatcgaaggggatttgagatttatcggtcgtacgttatgagggttttgtgggtgttgggtttttgttgcgttttgttgattttcggtgagtgattttggaggagtagacgttttttttttatatacgcggtcgtttttcgaaggttttgggggcgttgaacgtgggaggggggatttcggggtttgcggtgggttaagggacgttattatttttcgaaagagggtaagggaattacgtttatttttttttttttttggaaataaaaaaagagagtaatattatttaattgttttatagatttaatagtatttcgttcggaggttttagcgatttcggggtggggtttttttgaggttttggttttttcgggagttgtgcgagtttttttttttttttcgttcggaggattttttcggttatcgtaattttcggttattttagttttttcgttttttaattttttagatttcgatttttcgtaagttcgtgtttttttttagatgttggtttcgggagcgtgaggtttggggttagcggaatggtagtgttagcgtgtttgatttagttttgttggagttcggtttttaatatttttttttttttttatgtttttgggtttaattttagtttttttcgttagaggttgtataaattttatttgtattttgatttgtgttaacgaaggtcgaagttttggtttgattagttgggaggttttggttcggtttgcgcgtaatacgtgtgggtgtagaagaggtttggtattagtttgtttaacgttatttataaatgatcggagatatattgtttagaagtggtgattgttttcgtattttaggatttattggagattttagtatttgaatttaaatagatgttttgttttggttttatttttggtatttaaattagggaatgtatttttttatttttattttttttagttattaattgaattttgtaatttttatttttttttatttgattattttttttggagaagtgtgatgttgaagagtttgttcgtgttaaatttttagggtcggttagagttgacgatgaagttgatgtggatggtatagtagaagaggatttgggtaaaagtagagaaggattaaggacggatgatgaagt

SEQ ID NO: 66 - DNA, 2494 bp, Artificial Sequence
  Description of Artificial Sequence: Synthetic polynucleotide
attttattattcgtttttgatttttttttatttttatttagatttttttttattgtattatttatattaattttatcgttagttttgatcgattttgaagatttaatacgggtaaattttttaatattatatttttttaaggaggatgattaaatagggaagggtaggggttgtaaaatttagttggtaattaagggaggtggggatgaaagagtgtattttttggtttaaatattaaaggtaaagttaagatagaatatttatttaagtttagatgttgaggtttttagtagattttgaaatacggaggtagttattatttttaaatagtgtgttttcgattatttataaataacgttaagtagattgatattaggttttttttatatttatacgtgttgcgcgtaggtcgagttaaggttttttaattgattaagttaaaatttcggttttcgttagtataggttagaatgtaaataggatttatgtaatttttggcgaggggaattgaaattgagtttagaggtatgagaagggggagaaatgttaagaatcgaattttagtaaaattgaattaaatacgttgatattgttatttcgttggttttaggttttacgttttcgaggttagtatttaagaagggatacgggtttgcgaggagtcggagtttggggaattaggggacgggaaagttgggatggtcgaaggttgcggtggtcgaaaaagtttttcgggcggggaggggggaggggttcgtatagttttcgggggagttagagttttagagaggttttatttcgaggtcgttgagattttcgggcgagatattattagatttgtagggtagttagatgatgttgttttttttttttatttttagaggaagaagagaataaacgtaatttttttgttttttttcgaggaatggtgacgttttttggtttatcgtaggtttcgggatttttttttttacgtttaacgtttttaggattttcgagaagcggtcgcgtgtgtggaggggggacgtttgtttttttagaattatttatcgaaggttagtaggacgtagtagaggtttagtatttatagggtttttatggcgtgcggtcggtgagttttaagtttttttcgatcgtaggagtcgtttttatttttgggttcggatttttatatttttagtcgcgcggttcgtttattatattttaagtaggtcgggtcgttttttatttttatttttcgcgggcgggggacgggaaatatgaatttattaatcgcgtcgtattacgtatttacggtatttaatgaggattcgtgaggggggcggaagtttattaatcggagttgtttaggtgcggtgatcgatgttcgaagcgtggtttttttcgattggttagggtttgtagtttttttttaattaaatggtttcgcgggttttttatacgtgggatcgtttttttgtttgggcggttttggtttttaagggaaaacgtttaatgaatgtaagtagagaatatatttatttttttagagaggtcgcggcggaattattttcggattttagagagcgtttatttcgtgatcggggaaacggtagttatggtaacgtgttttttatttttttttatttatgtttggggtttcgttggaagtgattttagtacgattttcgcggttagttttttcgtgtggcggcgtttttcggaaagaagaaatatacgagagaggttgtaaattttttagaatttttttagatggcgggggggcgggggggtggcggtggtgagaaattatagttttcggtatgtaacgttttaggggtttattgtattgaatgttgggggtcgtagtttttggtttttgaggattagttgcgtagttttggtttttttttttacgtttttttagcgtgtttttgttagagttttgttttgcgttttagatgttatatttcgttttgattatagtagagatatgtgtttattttaggagtttttattgtatatagtttttagaagcgggtttagaaagtttttatgtttcgggtaaggtcgttcggttttggggggtcggtttgagtttgggggtttcgttttcggtttaagagtacgagttttcgaattcgtttataagtgcgttatttgggtattcggagcgtttattttttttgtgttttttcgcggtcggaatttttaggttttttttatttggtttatagaagaacgtggttgggattttttcgattattttagggaaatcgcgagtagcgttgaggttttcgattttttaataaagtataaaggcggcggtgatttgacggtcgtagaattttttttgtgaattaggtggagagcgtggtcgtaaaagcgggtttagtatagaaaaggaaaatttttagtttaacgagtgtaggaggatgtatttgtagatatttgaaagtaaaatttgtggtgttgtatatgagaacgggattgtagttttgtaattttatagaaa

SEQ ID NO: 67 - DNA, 2497 bp, Artificial Sequence
  Description of Artificial Sequence: Synthetic polynucleotide
tgaagattgtgtggagtgggaggtttgtgtttattttttttatttattggggaatgggttgagtggttgggggtaaagtgggatttaggggttttgtttagtttttattgtaggttaagtttttttttgcggttaagagttattgggttttttatttttttttggtttttattcgtagatttagatggttttatggtgatttagaggaggatgtattcgggcgttttttttgaggatggttgtagggattatttagggattgagtcgaggtgtagatatagttacggatttgggtgttgttagatatagaagggtgtgtagtaaagtgagttttacgtatgcgtagatttttttttcggtttttgttttttatggaaatataattgattatattatgattgattacggtagttttttagggtttttttttttttttttttttttttttttagaagttataaagggatatagaatatatttaaagattattttatgtttttagtggagaggtaaaaaaggttcgtttcggaatggggaagcggttgcgttttggacggagaggggcggggatttcgcgattgtaggcggagggagggcgggtgtcgttggcgtaggcggtgatagggagatatcgtcgttattgagtatttttatgtaagtttttttatttttttgtgtattagtgtttatattggggtaatgataaatgttgtgttgaaaaattatttgatggggttatggaaggaacggaaggaacggcgttttggttcgttcggggttcgcgtacgtcgttattaagtcgcgggggcgggtcggaggggagagttgcgttagttaggtcgttgttagatgacgagttcggggcgtgacggggtggagtatttttaaaaaagtgtatgtttaggatttcgtttagtgtatttttgcgcgcggcgggtcgggttgggtagttttataaatagtcgtggtgtgagtttcgaagggaattattagcgttttttgtttacggagttttaggtttataatggtagcggtcgttagtttcgcgttttttttgtgtttttcgtttttgtatttgttgtttggttggtttcgggtaggatgggtcggtgagttcggggatgtagtttaagtagggcgggggttaaatttgggaggttgtggattgtagcgggttttagaggaggggaggtttttggaaggatcggcgcgatttttttgaacgaatatcgcggttttttcgaacgtcgcggttttttcgaacgtcgcggttttttcgaatatcgcggtgttttcgaatatcgttgttttttcgaatatcgcgattttttcgaatatcgtgatttttttagatatgtttagttgaaggtatttagtttttttcggtggttttttttcgtcgggttcgttttttgcggttgttgtttgttttttaggttaggaggtttttggaaggatcggtgttgttttttcgaatatcgtggttttttcgaatatcgcggttttttcgaatatcgtttttttttcgagtaacgcgattttttcgaatatcgcggttttttcgaaaatcgcgattttttcgaatattgttattttatcgaatatcgcgatttcgtcgaatatgttcggttgaaggtatttagttttttttcgcggttttttttcgtcgggtttgatttttgcggttgttgtttgtttcgtaggttaggaggtttttggtagtatcggcgcgatgttttcgaatatcgcgttttattttaatatcgcgattttttcgaatatcgtgatttttttcgaatatcgtcgttttttcgagtaacgcggttttttcgaatatcgcggttttttcgaatatcgcggtattttcgaatatcgtcgttttttcgtatattgcgatttttcgaaatattgcgattttttcgaatatcgcgatttcgtcgaatatgttcggttgaaggtatttagttttttttcgcggtttttttttttcgggttcgttttttgcggttgttgtttgttttataggttaggaggtttttgggtggattagcgcgattttttcgaatatcgcggtttattcgaatatcgcggttttttcgaatatcgcggttttttcgaatatcgcgattttttagaatatcgcggttttttcgaatatcgcggttttttcgaatatcgcgattttttagaatatcgcggtttattcgaatatcgcggttttttcgaatatcgcggttttttcgaatatcgcgattttttagaatatcgcggttttttcgaatatcgttgttttttcgaacgtgtttggttgaaggtatttagttttttttcggggttttttttcgtcgagttcgttttttgtagttgttgttagtatcgtagtttagggggagtgttaaagaaggttgaaaaggaattgtaggagggtggagggattaaaaggttatagagggtaaggtagggcggggatttttggtgtagattcgtagttttattg

SEQ ID NO: 68 - DNA, 2497 bp, Artificial Sequence
  Description of Artificial Sequence: Synthetic polynucleotide
tagtggggttgcgggtttgtattagggattttcgttttattttgttttttgtagttttttggtttttttatttttttgtaatttttttttagttttttttgatattttttttggattgcggtgttagtagtagttgtaggaagcggattcggcggaaaggagtttcggaggggaattgagtgtttttagttaggtacgttcggggagatagcgatgttcggggagatcgcgatgttttgggggatcgcgatgttcggggagatcgcgatgttcggggaggtcgcgatgttcgggtagatcgcgatgttttgggggatcgcgatgttcggggagatcgcgatgttcggggaggtcgcgatgttttgggggatcgcgatgttcggggagatcgcgatgttcggggaggtcgcgatgttcgggtagatcgcgatattcggggagatcgcgttggtttatttagaagttttttggtttatggggtaagtagtagtcgtaggaagcggattcggaggaaaggagtcgcggaggggaattgagtgtttttagtcgggtatgttcggcgagatcgcgatgttcggggagatcgtaatgtttcgggggatcgtaatgtacggggagacggcgatgttcgggggtatcgcgatgttcggggggatcgcgatgttcggggagatcgcgttattcggggggacggcgatgttcgggggggattacgatgttcggagggatcgcgatgttggggtagaacgcgatgttcgggggtatcgcgtcggtgttattagaagttttttggtttgcggggtaagtagtagtcgtaggaattagattcggcggaaaggagtcgcggaggggaattgagtgtttttagtcgggtatgttcggcgagatcgcgatgttcggtgagatggtaatgttcggggagatcgcgattttcggggagatcgcgatgttcggggagatcgcgttgttcggagagagggcgatgttcggagaggtcgcgatgttcggggagattacgatgttcggggagatagtatcggtttttttagaaattttttggtttgaggggtaagtagtagtcgtaggaagcggattcggcggaaaggagttatcgaggggaattgagtgtttttagttgggtatgtttggggagattacgatgttcggggagatcgcgatgttcggggagatagcgatgttcgggggtatcgcgatgttcggggagatcgcgacgttcggagggatcgcgacgttcggggagatcgcgatgttcgtttagggagatcgcgtcggtttttttagaagtttttttttttttgaaattcgttgtagtttataattttttaggtttggttttcgttttgtttaggttatattttcgaatttatcgatttattttgttcgggattagttagatagtaggtgtagaagcgggaggtatagaaggaacgcggggttggcggtcgttgttattgtagatttggagtttcgtggataggaggcgttgatggtttttttcgaggtttatattacggttgtttataaagttgtttagttcggttcgtcgcgcgtagggatatattgggcgggattttaggtatgtatttttttggggatgttttatttcgttacgtttcgggttcgttatttgatagcggtttggttgacgtaattttttttttcgattcgttttcgcggtttggtggcggcgtgcgcgggtttcgagcgggttaggacgtcgtttttttcgttttttttatggttttattaaataattttttaatatagtatttattattattttagtgtaaatattgatgtataggaagatgaagaaatttgtataggaatatttagtggcggcggtgtttttttgttatcgtttgcgttagcgatattcgtttttttttcgtttgtagtcgcgaagttttcgttttttttcgtttagggcgtagtcgtttttttatttcggagcgaattttttttgtttttttattaaaagtatgaggtggtttttgagtatattttatatttttttatgatttttggaaaaaaaaaaaaagaaaagaaagaaagttttagagggttatcgtgattaattatgatgtgattagttgtgtttttatggagagtagaagtcgagggaagagtttacgtatgcgtggggtttattttgttatatatttttttgtgtttaataatatttaaattcgtggttgtatttgtatttcggtttagtttttggatggtttttgtagttatttttaaaagggacgttcgagtgtatttttttttgagttattatgaaattatttagatttgcgggtagaagttagagggaggtggagggtttagtggtttttggtcgtaagggagggtttagtttgtagtaaggattgggtagagtttttgagttttattttgtttttagttatttagtttattttttaatgaatgagaaaaataggtatagattttttattttatatagttttta

SEQ ID NO: 69 - DNA, 2455 bp, Artificial Sequence
  Description of Artificial Sequence: Synthetic polynucleotide
ggattttttatttcggttgtagtttttcgcgtagtgagaaggtagcggtttttgagagtttagtagtgttttgggagtttgtagaacgtaggggcggatttcgcgtcgtattggtcgttaaggggcggtcgcggagggaaggggtgggtcggtgggtttgatagcgggtttgcgtaggcggtagcgtttgttttttttagtttttcgtttcgcgttatgggcgggtttcgggttttgttggtcgtattttgggcgttggaagtcgtcgggatcgtcgcgtttcgtatcggagtttttaatatttagagtttcggtgatagtaaagtgtcggatttcgtttgcggtagtattatcgcgaaggtggggttcgggtcggggcggggcggcgtttaggggtgttgatcgcgttgattttcgtattcgtcgtttttttttagattttggttggttatgatttcgcgttggtgtaggaggtgcgagatttagattttagcgtcgtgttcgcgtttatggagtagattaataggtgtggtgggtagggtttttcgtcgcgatttttcgtcgggatttcgtttcggcgcggcgtttcgattttgagcgggtttttgtttttatagcgtgttcgagtacgagtatagttttgtgagtagttagtttttgggtcgggattagtataaggagatgtatttgttcgtgtataggtgaggggcgggtcgtagggaggggcgcgcggggtcgtaggtcgggggtttagcgggttttttttattttttaggaaagacgcggtgtcggtcgtggatatttatttgtatttagatttcgaggacgtttttagtcgcgagtttttcgtggttaagttttcggttttcggtatcggtgagcgggtttcgttttttttttttcgtcgagttttgacgtttttattttttttcgtagtagtatagaatttggtgttgatttcgttgtacgcggcgtcgtattaagtcgtggcggagatcgacgcgttttacgacgtgtatttggacgtgatcgataagtggggtatcgacgtaagtttatttttcggtttcggggtttttgtaggcgcgtttcgggggtttggtttatgagggcgggatttcgacggtttttgcggcggtttagatacggtttcgcggcgttcgtaggatatgttgtttttgggcgattttaacgtcgattgtagttatgtgcgggcgtaggattgggtcgttattcgtttgaggagtagtgaggtttttaagtggtttatttttgatagcgtcgatattacggtgggtaatttagattgcgtttacgatcgtattgtggtttgtggcgttcgtttgcgtcggagtttgaagttttagtcggttatcgtgtacgatttttaggaggaattcggtttggattagatttaggcgagtgggtcgtggggcggtgttggttttgggtttttatcgttcgggcgtacgtaggtagtagggagggtttagcgtttaaggtagggttattttagttttttttttgtattagggttcgtttttaaggattttggagagttcggtttattttatgtggagttttgggtaggtagggtattttgttttttttttaaagggttaatggtgatattttttgtttcggtttttgtttttgttttatcgtaggtagtagtaggggtgggtatttaggttttatcggttttttttatttttgtgggtggggtgtattttttttttgaggtttattttgtttttataggtttttgttattagcgattattttttagtggaggtgatttttaagttttatcgatgattcgaggtttggttggggtatgttatttgtagattttggttttgaggaatggtttaatagtggtttttttagggtggtagttattttttagtgaggttttaaggtagagtcggttgggcgtggattaggggttatggatacgtgatgtgttgttttgtattttcgttttttatttgtgggacgggttgtatttagcgattttatggggtgttgtgagttttatgaggggtgtagggggtattgttcggtagatgtttgtttaataaatgagttgttttcggtcgggttttatagtttggtttttaggtttttgtttttttttaggatttagttttagttttttaggggtagttatggtttgggttgtttattttatgttttggtgggacgtggttgttttcggagtttgttggttttagaaggtagtttagggatgttttttgtttattttttgtggaaattataaacgtttttaggagtttgtattgtgagtatagttgggatagggatggcgttaatatattagttttttgggttttcggggtttttagaatagttttttttaggtttatttcgtagtttttattttagggttttgtaggggtttttaggtatttgtttgttttaagagttcggt

SEQ ID NO: 70 - DNA, 2455 bp, Artificial Sequence
  Description of Artificial Sequence: Synthetic polynucleotide
atcgggtttttgagatagataagtgtttgggggtttttgtagggttttggaatgggggttgcggggtgggtttggggagagttgttttgagagtttcgagggtttaggaggttggtgtgttggcgttatttttgttttagttgtgtttatagtataggtttttgggagcgtttgtagtttttatagaggatgagtaaggagtatttttgagttgttttttggggttagtaggtttcgggggtagttacgttttattaggatatggggtgggtagtttaggttatggttgtttttaaggagttgaggttgggttttgaggaaggatagaggtttgggagttaagttgtggggttcgatcgggagtagtttatttattgagtagatatttgtcgggtagtgttttttgtattttttatggggtttataatattttatgaggtcgttggatgtagttcgttttatagatggggaacggaggtatagagtagtatattacgtgtttatggtttttggtttacgtttagtcgattttgttttggggttttattgaagggtggttgttattttgaaggggttattgttgggttattttttagagttagggtttgtaggtggtatgttttagttaggtttcgagttatcggtggaatttgagggttatttttattggaaagtggtcgttgatggtaagagtttgtggggatagagtgaattttaggggaaaagtgtattttatttatagggatgggaggggtcggtgaggtttgggtgtttatttttgttgttgtttgcggtggggtaggggtaggggtcggggtagagggtgttattattggttttttgagggaaaggtaaggtattttgtttgtttagagttttatatggggtgggtcgggttttttagggtttttggaaacgagttttggtgtagggaggaagttgaggtggttttgttttgggcgttggattttttttgttgtttgcgtgcgttcgggcggtggggatttaagattagtatcgttttacggtttattcgtttgagtttggtttaggtcgaattttttttggaagtcgtgtacggtggtcgattggggttttaggtttcggcgtaggcgggcgttataggttataatgcggtcgtaggcgtagtttgagttgtttatcgtggtgtcggcgttgttagggatgagttatttgaagattttattgttttttagacggatggcggtttagttttgcgttcgtatatagttgtagtcggcgttgaagtcgtttaggaatagtatgttttgcgggcgtcgcggagtcgtgtttgagtcgtcgtaggagtcgtcgaggtttcgtttttatgaattagattttcggggcgcgtttgtagggatttcgggatcgaggggtgggtttacgtcggtgttttatttgtcgattacgtttaggtatacgtcgtagagcgcgtcgattttcgttacggtttgatgcggcgtcgcgtgtagcgggattagtattaggttttgtgttgttgcgggaaggggtgggggcgttagagttcggcgggaggggaggggcggggttcgtttatcggtgtcgggggtcgagaatttgattacgaagggttcgcggttgaagacgttttcggggtttgggtataggtaggtgtttacgatcgatatcgcgttttttttaggagatggggaggattcgttgagttttcgatttgcggtttcgcgcgtttttttttgcggttcgttttttatttgtatacgaataggtatatttttttgtattggtttcggtttaggggttggttgtttataaagttgtattcgtgttcggatacgttgtggagataggggttcgtttagggtcggggcgtcgcgtcggggcgagatttcggcggggggtcgcgacgaggggttttgtttattatatttgttgatttgttttatgagcgcggatacggcgttgaggtttgggtttcgtattttttgtattagcgcgaggttatagttagttaggatttggggaggagcggcgggtgcgggggttagcgcggttagtatttttaaacgtcgtttcgtttcggttcgggttttattttcgcgatgatgttgtcgtaagcggggttcgatattttgttgttatcgaagttttgaatgttgaaggtttcgatgcgaagcgcggcggtttcggcggtttttagcgtttagagtgcggttagtagagttcggggttcgtttatggcgcggagcgagaggttgggagggatagacgttgtcgtttacgtagattcgttgttagatttatcgatttatttttttttttcgcggtcgttttttgacggttagtgcgacgcggaattcgtttttgcgttttgtaggtttttagggtattgttgggtttttagggatcgttgtttttttattgcgcgggaagttgtagtcggaatggagggttt

SEQ ID NO: 71 - DNA, 2738 bp, Artificial Sequence
  Description of Artificial Sequence: Synthetic polynucleotide
tgtattgttgagggttatcgattatcgagaattaggtttagtttttagaggaagcgttagaggagggggagggtgggcgagggtttcggggtggtgggggtgtcggttttagtatgtggaggcgataggattcgtaagattttacgcgtcgtcggggtaggatcgtatagggtcgttatttatttatttggggcgtttttaatgggtattcgtgtattttagttcgtgcggtgagcgtacgtacgtcgtcgttgtcgcgtttatacggttttttaaagtcgggggaggggtcgtggagcgaaggagttgtaggtagatttttttttttttttcgagttgggaaaagggttagtttcgtgttttgtacgtttggttttgttttgtagtttgtcggtgagttaagagtcggtagagtagaggaggcgtacggttcgggtcgtgttattattttttggtttgttgatttggttaggagttggggatggcggtagtatcgcggaggtacgttttgcgttgtttttacgttttttttcgaaagtagtgtttttagggggaaagttcgtaatgttatttgtttcgtcggtaaagttttgggatgtcgggtattttttgaggagggggaagacgcggtatttttattgaggtcggtaggttaggaagagaagtttttcgggcgtagggcgtagtttagtttcggggattttttgggtttttcgcgtgtcggtcgggatgaagcgcgttttgtatcggattcgggattcgggggcgggggttggcgttggtagcgttagacgttgttttattttttttcgattttggggaggatagtaataagttttgttttagttattttattattttgttagtacgtgtagatttcgggttttcggagttcggcgcggatttcgttttgtttcgcgtttttttttgtacgtttcgtgttattttaagagtttgcgtggttttgggtgggcgtttggttttcggcgaaacgtttggggcgcgtcgcgtgggtgtacggtgtttttttttagtagttttcggttgcgggggtatatgtatttatttgtattttgtagggataggcggtttttttgttgggagtttttgttttggggattttcgggtgggttggtggcgtcggtttttcgcgtcgggttaaaggtggttaatattaaagttagggttatgaattggtttagtcgttcggtatatatggtttttggtattaatttttcgtcgggagatttggattttttgtgttttttttttttttttttttttttttttttttcgtcgtttttttttttttttttattttttttttttgttcgttttttttttttttttcgcggtcgcggttcggatagaggttatttagcgttttttcgtagtttttcggagagtatgtgattaggtcgttagtagcgtcgcgagtgttcggtaatggtagggatggtgttttaaatatttttggaagttttggtgttatttgaatgaaggagtcgagtaggtgttgtttcggcggttggattaattcgagatttcggtttttttgataatacggtcgggaggcggggtttgcgtttaattattataggaggaagtcgagcgtcgttgggagcgtcggataaagttgtcgatttggcggcggttacgcgtttgcgtgcgtgtgtatgagtgtgtgtgagcgcggtcggagatgcgtgcgcgtgtgcgggtgttttagggtaatggtcgaaaggattgtataatataagagcgaatttaagttttagttgttgttaaagggggacggtgtgttttgggatagtgtttttggggtttttggttcgcgttatatttatatcgggttgggaaagtttttttttttcgtcgtttggaatttagtgagatttttagtttagaggatttgataaattgaagtagttttttaggtataatgatgttgtgggttaattgagtatatatgggaatttttggttttgtgatattttgtattaaaaagaattttacgattgaagataggagtagaagtattagatatagtatttggtttgagtaattgttttattttttcgttttggtgggtcgtgtaatatttggagtgtcgtttttcgttttttttttaatttagacgtattttaggttgggttgtagggatttaggtgatagttaggatttgtattatttttaggagggtggtagggaggtttaaggtagttttgagttagttcgtcgcggagtatcgcgtgttcggaggttagagtttgaaaggtaattttacgcgtttttaaatatatttttgtatttttttaaagcgttgttcgttatttcgtttcgggtttttttttattttttagttattcgatggaagtggtgagaataaaaataaagataaaaaagttaaattcggggaagttatttttattttttttttttttttgttcggttttttttttaagaatcgtcgggtcgggatagttttcggttatttttttattcggttcgtggagggaaggagaaagttgggcgtcgtttggagcgtttttttttttgttgtgtgtgtacgtgtgtacgtttacgtttttttcgcgtcggggtcggggataggaattgttttcggtttcgttattttacggcgtagttcggggggttcgtagggttgggggagggcggggatacgagcgtcgcgtttaagcgttttagggtacgtattcggcgttggcgcgtattcg

SEQ ID NO: 72 - DNA, 2738 bp, Artificial Sequence
  Description of Artificial Sequence: Synthetic polynucleotide
cgagtgcgcgttaacgtcgggtgcgtgttttggggcgtttgggcgcggcgttcgtgttttcgtttttttttagttttgcgagtttttcgagttgcgtcgtggggtgacgggatcgagagtagtttttgttttcggtttcggcgcgggggagacgtgagcgtgtatacgtatatatatagtaggggaagaggcgttttaagcggcgtttaattttttttttttttttacgggtcgggtgagaaagtagtcgggggttatttcgattcggcggtttttggggagggggtcgaataagaaaagggaggagatggagataattttttcggatttagtttttttgtttttgtttttgtttttattatttttatcggatgattggagagtaaaagggaattcggagcggggtggcgagtagcgttttgagaaaatgtaggagtgtgtttggagacgcgtaaagttgttttttaagttttggttttcgggtacgcgatgtttcgcggcgggttgatttagggttgttttgggtttttttgttatttttttggaaatgatgtaagttttgattgttatttggatttttgtagtttagtttggaatgcgtttggattaggggaaagacgagaaacgatattttaggtgttgtacggtttattaaagcgggaagatagggtagttgtttagattaaatattgtatttagtgtttttgtttttatttttaatcgtggggttttttttaatgtaaagtgttataaggttaggaatttttatgtgtgtttagttggtttatagtattattgtgtttaggaaattgttttaatttattaagttttttgggttgggaattttattgaattttaaacggcggaaagaggaaatttttttaattcgatgtgggtgtgacgcgagttaggggttttagggatattgttttagagtatatcgtttttttttaatagtaattggagtttggattcgtttttatattgtatagttttttcgattattgttttggagtattcgtatacgcgtacgtattttcggtcgcgtttatatatatttatatatacgtacgtaaacgcgtggtcgtcgttaggtcggtaattttgttcggcgtttttagcggcgttcggtttttttttgtagtagttgagcgtaggtttcgtttttcggtcgtgttgttaaaagggtcggggtttcggattggtttagtcgtcgggataatatttgttcgatttttttatttaagtgatattagagtttttagggatatttgaggtattatttttgttattgtcgggtattcgcggcgttgttaacggtttggttatatgtttttcggagagttacgggagggcgttgggtaatttttattcgagtcgcggtcgcgaggaggagggaaaaggcgagtaaaaaggaagagtgggaggaggaggggaagcggcgaaggaggaagaggaggaggaggaagaggggagtataaaggatttaggtttttcgacgggaggttaatattaagaattatgtgtgtcgagcggttgggttagtttatgattttggttttggtgttggttatttttgattcggcgcgggggatcgacgttattaatttattcgagggtttttaagataggagtttttagtagaaaggtcgtttgtttttgtagaatataggtaagtgtatgtgttttcgtagtcgggagttattgggagaggatatcgtgtatttacgcggcgcgttttaggcgtttcgtcgggagttaggcgtttatttagggttacgtaaatttttgggatggtacgggacgtgtaaagggaagcgcgaggtaaggcgaggttcgcgtcgggtttcgagggttcggaatttgtacgtgttagtagggtgatgaaatggttggggtaggatttgttgttgttttttttagggtcgaggggaaatgaagtagcgtttgacgttgttagcgttagttttcgttttcgaatttcgggttcggtgtaaagcgcgttttatttcggtcggtacgcgggaggtttagagggttttcggagttgggttgcgttttgcgttcggagaatttttttttttggtttgtcggttttagtaagggtgtcgcgttttttttttttttaaaagatgttcgatattttagaattttgtcggcgagataaatggtattgcgaattttttttttgggggtattgttttcggaagggagcgtgagggtagcgtaaagcgtattttcgcggtgttgtcgttatttttagtttttggttaggttagtaagttaagaaatggtgatacgattcgaatcgtgcgttttttttgttttatcggtttttggtttatcggtaagttgtaaagtagagttaggcgtgtagggtacggggttggttttttttttagttcggaaagagaaagaaaatttgtttatagttttttcgttttacgatttttttttcgattttggggggtcgtgtgaacgcggtagcggcggcgtgcgtgcgtttatcgtacgagttggaatgtacgagtgtttattagggacgttttaagtgagtgaatggcggttttgtgcggttttgtttcggcggcgcgtggggttttacggattttgtcgtttttatatgttggggtcggtatttttattatttcgagattttcgtttatttttttttttttttggcgttttttttgagaattgaatttgattttcggtggtcggtgatttttaataatata

SEQ ID NO: 73 - DNA, 2401 bp, Artificial Sequence
  Description of Artificial Sequence: Synthetic polynucleotide
gcggtaggcgaggcggggtgtaggtgtgagtggggtgggaggaaggggaaaggatcggggtcgtcgtagtttttttggttagtttcgttgggttttgttagtttcgtttgagatcgaggcgtacggattagcggtcgttagtattttataggtggaggatattttttgcgttttaaggttaatgttatttcgatgggtttcgtgtcgttttgattttttttgatttaattttttggttatgatttttttattttttgggtttcgtttttgttagttttcgtcgacgtcgtttttttcgtcgttcgttcgggtttttttattcgtttttttttttttttggttcgacggttttattgaggtaaaaataaatagttttgagggtattttaaggagcgtgtagtggtttcgacggtattttcggggggataaaagaggtggttagttacgtcgtcggttttcggtcgaataatgggcgcgtagtagattgttagggggtatttgaaattcgaggggagggaaatatttgagcgcggttttttttcgcgaggacgtacgacgtagtttcgcggatcgttttttgttcgtttttttttatgtattttttttttgtgtggaattatttaaacgggagatttttggtagttttatgttaatgcgtcgaataaaggtaacggttcgcgggcgggaggttcggaaggtgtttggggtcgggtcgggcggggtggcggttaggcgggttgcgcgtgtttttcgcgtgtttttgggattgatataataattttttatttttgtaaatataaagttttttatcggttcgggtcgggcgtattcggcgtagggaggcgttggttttttcgggcggcgggtattgtagcggtaacgtacggtttttgtcggttgtggttcgggggattgagggtcgggagtgggggtttttgtgaagttagaagagaagtttgtagtagagtggtgatgaggggcgttgatattttatttttaacgtcgacgtttttaaacgcgatattttttgcggggtgagaatgcgggttcgttcggtttttttcgtgaggttagggttttttgtttttttagatattttaaggagttaattttttcgtagaagtttttcgtttttgtttttatttttaagtttcgcgttttttataaattttttgttgttttgattttgatttttagtcgtggtgagggttagagtgaatttcggcgcgtttttcgacggtattttcgtatattaggataggagaaattggagggtttggggtttcgggtttcgtagtcgtcggaggaagaatttatcgcggggttcgtaagggaaagtgaagaggttcgggatttttttaaagcgttggttaggatttcgaaggaaggggaggagttatttgaagtcggggaaggttttttgggtgttttgttttggatttttatgtttattgattttcgcgaagtttttttggaggggggtaaattcgcgttgttttttttaatttaattttacgcggtttatttttcgaatcgcgtgcgttaaggtcggcgtcgggggcgtattgtgatggcgttttgttttttttaggcgaagataaatatttcgattcgatgtttttatgtatgcgggtgtataggttttgagaaaattacgtagaaggcggttgcgatttacggttcgggttgggttatatttgtttggaggtcgttggtgtgtgcgtgcgcgcgtgcgtagtttaattttttttagtttcgggtggtgaaattagtttttaatattagtattttttaagtttttatttattttgattgtattcgtttgaaagtagattttatttacgttagtaagattggaagttataaataaagaaaaagaaacggatttattgaattttagtattttagtagcgtttaatagatttttttggttaaatttagagttttgtttgaatttatttacgtaggagttgttttgttttttttgttggtagaggtgtcggttttttatttttacggtttatttataattatgggtgttgttatttttaaaggatttataaggtgattaattttttgttatttgttgaatggaaggagtgttatatatgtaagatcgaatggggtaggtcgagttttcgttttatgttattttataatttagatgggattcgtgattagaaaataaaattggttaaagttgtttcggaattttttttttatttttaattttattagtattattaattagagtttaaaagagtaaggaaataatattagttatttttagatagaaatatgtttataaattttagataaatttattttaagatttttaatttttggggagattagtatttattatagtatttttaaaattagggtgagattttttaaaata

SEQ ID NO: 74 - DNA, 2401 bp, Artificial Sequence
  Description of Artificial Sequence: Synthetic polynucleotide
tattttgaaaagttttattttagttttaaaaatgttgtggtgagtgttagtttttttaaaagttagaaattttaaaatgagtttatttaaaatttataaatatatttttatttaaaagtaattgatgttatttttttgtttttttgagttttgattaatagtgttgatgaaattagaagtgggaaaaggatttcgagatagttttggttaattttattttttaattacgaattttatttggattgtagaatagtatagggcgggggttcggtttgttttattcggttttgtatatgtaatattttttttatttaatagataatagagagttagttattttgtgaattttttaaaaataataatatttataattgtaaataagtcgtggggatgggaaatcggtatttttattaataaaaaaaataaaataatttttgcgtgagtgaatttaaatagggttttgaatttagttaagggaatttattaaacgttattgagatattgagatttaatgaattcgtttttttttttttatttgtggtttttagttttgttagcgtaaatgaaatttgtttttagacgggtatagttaaaataaatggaaatttgaaaggtattagtattggaaattaattttattattcggggttggaaggagttaggttgcgtacgcgcgtacgtatatattagcgatttttaagtaggtgtagtttagttcgggtcgtggatcgtagtcgttttttgcgtgatttttttagaatttgtgtattcgtatgtatggggatatcgggtcgagatatttgttttcgtttgggaagagtaaagcgttattatagtgcgttttcgacgtcggttttggcgtacgcgattcggagaatgggtcgcgtgaagttaagttgggggaaatagcgcggatttgtttttttttaggggggtttcgcgaaagttagtgaatataaggatttaaggtagagtatttaaggggtttttttcggttttaggtgatttttttttttttttcggggttttggttagcgttttggaaaaatttcgggtttttttatttttttttgcggatttcgcggtgggtttttttttcgacgattgcggagttcgaggttttaggttttttaattttttttattttggtgtgcggggatgtcgtcggggagcgcgtcggggtttattttgatttttattacggttggaaattaaagttaaggtaatagggagtttgtagaaagcgcgaagtttggaaataagagtagaagcggggaatttttgcggaggagttggttttttggggtgtttaggagaataggaggttttggttttacgggaggagtcgggcgggttcgtatttttatttcgtagagggtatcgcgtttggagacgtcggcgttgggggtgaggtgttagcgttttttattattattttgttgtagattttttttttggttttatagaagtttttattttcggtttttagtttttcgagttataatcggtaggaatcgtgcgttatcgttgtagtgttcgtcgttcggagggattagcgtttttttgcgtcgggtgcgttcgattcgagtcggtgagaggttttgtatttgtaggaatgaggggttgttgtgttagttttaggggtacgcgagagatacgcgtagttcgtttggtcgttatttcgttcggttcggttttaggtatttttcgggtttttcgttcgcgggtcgttgtttttgttcggcgtattagtataaagttgttagggatttttcgtttagataattttatataaaaggagagtgtatgaaagagagcgaataagggacgattcgcgaggttgcgtcgtgcgttttcgcggggagggatcgcgtttaagtattttttttttttcgagttttaagtgttttttggtaatttgttgcgcgtttattattcggtcgggggtcgacggcgtggttggttattttttttattttttcgagagtatcgtcggggttattgtacgttttttgaagtgtttttagggttgtttgtttttgttttagtgggatcgtcgggttagggagggaggagagcgggtaggaaggttcgggcgggcggcgggaagggcgacgtcggcgaaagttggtagaggcgaagtttagaaggtgagaaagttataattaaagaattaggttagggagagttaggacggtacgggatttatcgggatgatattgattttggggcgtaagaggtgttttttatttgtgaggtgttggcggtcgttagttcgtgcgtttcggttttaaacggaattgataaaatttagcgaaattgattagaaaggttgcggcgatttcgattttttttttttttttttattttatttatatttgtatttcgtttcgtttgtcgt

SEQ ID NO: 75 - DNA, 2476 bp, Artificial Sequence
  Description of Artificial Sequence: Synthetic polynucleotide
aattattaggaggttgggggaaaagaggggaaaaacgggtaaggaaggttgtaaatgttaagatgttaaataggaatttaatcgaagttcgaagtgaaatatagttttttttggtttaattgttatgtaaataatttttaagtatttttagatgtaaagaaaaatagttattgtgtataggcgttagttgaatgttcgagagttggatgaatggggaagatttgttatatatttagtggtgggtggattttattaggttgtagtttttatatagtttttttttgttgtattgtagaggcgttatttttttcgttttaatttttatttaattcgatttttttatttgtattttaaaaaaaagatttttcggattttttttagtattttgtgtttttaggggaattaaattagagtttttagagttgttagggaagaggtcgcgttttaattagataaacgtttttttggatgtataggatagagttcgtgtttttttattattcgttattgttttttttagacgtatattttatttttcgttttatttttttttcgttaaggattttatagtttagtatagaattaagtttcggaggtgattcgagggtgggaagtagaggggtttcgaggtttcgttagaagtttcggtagcgtttttgtttttttttaggcggacgcgtagtttcgggaagggagtcgggcgggagtttcggtggcgtattgagattaacgcggttcggtttacggcgagggcggggtgtcgcggtttttgttttcgcggattttttgttttttagatagagtttagggtgcgagcgaattttcgggacgtttagatttggggaaggcgcggggtggttatgggttttcgattttttttatttttcgtaagttatataaaagggagacgcggatatgtataaagtttgtttgtggaaggcggtgcgcgatttcgacgtcggttcgggttagggtcgtatttaggttgtcgtcgttagtagtcgcgaaaagaggttggagtaaggaagggggatgggggtgagagaggaaggtgaaacgaggcggagaacgtagggaaaagcgaggggtttttagttttttgggttgtttcgattttttttttttttttttagggtttaagagaaaggaaagggtaacgatttaagagcgaaggattggttttagggacgttgcgttttcggttttttttacgtgttttttttttttttttttttgtttgaatgtttttcgtttttttcgattttcgtttttaaggtagggattaagtcggggtttgggtttagggtcgttttttatttttttcgtttcgggttggcgcggaattagggagattagcgtttcgttcgtttttttttagcgggtcggagcgcgattttttggggtagggttgggtcgaaagcggggatgcgttggacgttcgtaagcgggggcggagaggagaggggttttattgacggattttcggtttttttgtattaaagatttgggttaaggttttggggggtatcgcgtttttatcgtgtagttttttttcgtttttcgaggcgcggtatttatttttagcgttcgagtcgtttaggcggttagtaggagtagtgttaaatcgggtagtatcgcgattttgcgcggggtatcgagtgcgttgttgtgcgagtgggattcgtcgcgtttttgttttgttcgcgtcgttatcgtcgtcgtttttcggggttttcgcgtacgttttttcgcgtgttttcgtttatcgttgtcgaggaaattgacggagttcgagcgcggcggcggggtttagagttaggcgagttagttgattcggtttatttcgttcggtattcgagagagatttttagcggcgtcgtcggggaattgcgttcgttcgcgtcgggaggggttttcgcgtttcgcgtttataggtgtacgcgtttttggcgtcgtttgtattttacgcgtttttttcgtttttcggtcgacggtttatttgggtttcgtgaatagtgggagggagagtttggggttaggagagggacggtgtaggattagggaaaggtgagttttaggacgttgaggttttagaaaagtcgagagcgtttttgttcgttttcgtgagtttgaattattcgatttcgtaggtttttcgggggtgtcgtataaaggattgttgttagggtgcgtttttattcgtatttcgttttttttttcggtttggagaggtggggtaggcgtttttggaagagaatgagaacgagtgaagtttaaaggaaataggattttttttgtttgttgagatagtaaaattttattttttaatttttaacgttaaaagtaggtacgagtaatttggaatttttatttttagaacgaattaaaggagtaaggcgtaggatttggtaaagaagcggttaatttatttatttttttttgaaagtagggttttgggtttgggttttgttttttt

SEQ ID NO: 76 - DNA, 2476 bp, Artificial Sequence
  Description of Artificial Sequence: Synthetic polynucleotide
aaagaaataaaatttaagtttagaattttgtttttaagaagaagtaaatgggttggtcgtttttttgttaggttttgcgttttgtttttttggttcgttttaaagatagaaattttaggttgttcgtgtttgtttttgacgttgggggttaaaaaatgaggttttgttgttttaataagtaaagaaaattttattttttttaagttttattcgtttttatttttttttagaaacgtttgttttatttttttaaatcgagagaaaaaacgaaatgcggataaaaacgtattttagtagtagttttttatacgatattttcgggaggtttgcggggtcggatgatttaagtttacggggacgagtaggagcgttttcgatttttttagagttttagcgttttaggatttatttttttttgattttgtatcgttttttttttggttttagatttttttttttattgtttacgaagtttaggtgggtcgtcggtcggggagcggagggggcgcgtggggtgtaggcggcgttaagggcgcgtgtatttgtgggcgcggggcgcgagggtttttttcggcgcgagcgggcgtagtttttcggcggcgtcgttaggggtttttttcgggtgtcgagcggggtgggtcggattagttgattcgtttggttttgagtttcgtcgtcgcgttcgggtttcgttagttttttcggtagcggtaggcgagagtacgcggaggagcgtgcgcgggggtttcgggagacggcggcggtggcggcgcgggtagagtaaggacgcggcggattttattcgtatagtagcgtattcggtgtttcgcgtagggtcgcgatgttgttcggtttggtattgtttttgttggtcgtttggacggttcgggcgttggaggtgggtgtcgcgtttcggaaggcggggggaggttgtacggtggggacgcgatattttttaagattttaatttaagtttttaatgtagagaagtcgggggttcgttaatgggatttttttttttttcgttttcgtttgcggacgtttagcgtattttcgttttcggtttagttttgttttagggagtcgcgtttcggttcgttgagagggagcgggcgaggcgttggtttttttggtttcgcgttagttcggggcgagaagggtagggggcgattttgagtttagatttcgatttagtttttgttttggaagcgggggtcgggggaggcgagagatatttagataggggggaagggggaaggagtacgtggggaaaatcgaaaacgtagcgtttttaaagttagtttttcgtttttgaatcgttgttttttttttttttttgggttttggggaggaggaggaggagtcgggatagtttaggaagttaggagtttttcgtttttttttgcgtttttcgtttcgttttattttttttttttatttttattttttttttttgttttaattttttttcgcggttgttggcggcggtagtttgggtgcgattttagttcgagtcggcgtcggggtcgcgtatcgttttttataggtaaattttgtgtatgttcgcgttttttttttgtgtaatttgcgagaaatgggaggggtcggagatttatagttatttcgcgttttttttaagtttggacgtttcgggagttcgttcgtattttaagttttgtttgagaggtagaaggttcgcgggaataaaagtcgcgatatttcgttttcgtcgtgggtcgagtcgcgttagttttagtgcgttatcgaggttttcgttcggtttttttttcggggttgcgcgttcgtttgggagggggtagagacgttgtcggggtttttggcggagtttcggggtttttttgttttttattttcggattattttcgaggtttaattttgtgttgggttgtaaagtttttggcggggaggaaataaggcggagagtgggatgtgcgtttggaaagggtagtggcggatggtggggaggtacgggttttgttttgtgtatttaaggaggcgtttgtttgattaaggcgcggttttttttttggtagttttggggattttggtttagtttttttgggggtataggatgttggggagggttcgaagggttttttttttagggtgtagataaaaggatcgaattgagtgaagattaagacggagaagatggcgtttttgtagtgtagtaaagaaaagttgtgtggaggttgtagtttagtgaaatttatttattattaggtgtataataagttttttttatttatttaattttcgaatatttagttaacgtttgtgtataatgattgtttttttttatatttgaagatgtttagaagttgtttgtatgatagttgggttagaggaggttgtattttatttcggatttcggttgggtttttgtttggtattttaatatttgtaattttttttattcgttttttttttttttttttttagttttttagtaatt

SEQ ID NO: 77 - DNA, 2494 bp, Artificial Sequence
  Description of Artificial Sequence: Synthetic polynucleotide
tttttatgaagttataaagttgtaattttgtttttatgtgtagtattataggttttgtttttaaatatttgtaggtgtatttttttgtatttgttaaattaagggttttttttttttgtgttagatttgtttttatgattatgttttttatttgatttatagaaagggttttatgattgttaggttattgttgtttttgtattttattggggagttgaaggttttagtgttgtttgtgatttttttaaggtggttgggaaggttttaattatgtttttttgtaaattagataaggaaggtttggggattttggttgtggaaaggtatagaggaggtgaatgttttggatgtttaagtgatgtatttgtaggtggatttggaaatttgtgtttttgagttggaggtggagtttttagatttagattgattttttagaattgggtggttttgtttgaggtatgaaggttttttaggtttgtttttaaaagttgtgtataatggagatttttggaataggtatatatttttattgtaattagaatgagatgtaatatttaagatgtagggtagggttttggtaaagatatgttgggggaatgtgaaagaaagggttaaaattatgtagttggtttttagagattaaagattatgatttttagtatttaatgtagtgaatttttaggatgttgtatgttgggagttgtagttttttattattgttatttttttgtttttttgttatttgaaagggttttaggggatttgtaattttttttgtgtgttttttttttttgagaagtgttgttatatgagaaagttggttgtgaaagttgtgttggaattatttttaatgaaattttaggtatagatgggaaagggtgaagaatatgttgttatggttattgtttttttggttatggaataaatgttttttaggatttggaagtagttttgttgtgatttttttaaaaggatggatgtgttttttgtttatatttattggatgtttttttttagaggttaaggttgtttaggtaaaggggtggttttatgtgtgaggggtttgtggagttatttgattggagaaaagttgtaaattttgattaattggaaggagttatgttttgggtattggttattgtatttggatagttttgattggtggatttttgttttttttatgaatttttattgggtgttgtgggtgtgtggtgtggtgtgattggtgggtttatgttttttgttttttgtttgtgagaagtgggggtgaaaagtggtttgatttgtttggggtgtagtgggtggattgtgtggttggaggtgtgaggatttgaatttaggggtggaggtggtttttgtgattgaaggggatttgagatttattggttgtatgttatgagggttttgtgggtgttgggtttttgttgtgttttgttgatttttggtgagtgattttggaggagtagatgttttttttttatatatgtggttgttttttgaaggttttgggggtgttgaatgtgggaggggggattttggggtttgtggtgggttaagggatgttattattttttgaaagagggtaagggaattatgtttatttttttttttttttggaaataaaaaaagagagtaatattatttaattgttttatagatttaatagtattttgtttggaggttttagtgattttggggtggggtttttttgaggttttggtttttttgggagttgtgtgagttttttttttttttttgtttggaggatttttttggttattgtaatttttggttattttagtttttttgttttttaattttttagattttgattttttgtaagtttgtgtttttttttagatgttggttttgggagtgtgaggtttggggttagtggaatggtagtgttagtgtgtttgatttagttttgttggagtttggtttttaatatttttttttttttttatgtttttgggtttaattttagttttttttgttagaggttgtataaattttatttgtattttgatttgtgttaatgaaggttgaagttttggtttgattagttgggaggttttggtttggtttgtgtgtaatatgtgtgggtgtagaagaggtttggtattagtttgtttaatgttatttataaatgattggagatatattgtttagaagtggtgattgtttttgtattttaggatttattggagattttagtatttgaatttaaatagatgttttgttttggttttatttttggtatttaaattagggaatgtatttttttatttttattttttttagttattaattgaattttgtaatttttatttttttttatttgattattttttttggagaagtgtgatgttgaagagtttgtttgtgttaaatttttagggttggttagagttgatgatgaagttgatgtggatggtatagtagaagaggatttgggtaaaagtagagaaggattaaggatggatgatgaagt

SEQ ID NO: 78 - DNA, 2494 bp, Artificial Sequence
  Description of Artificial Sequence: Synthetic polynucleotide
attttattatttgtttttgatttttttttatttttatttagatttttttttattgtattatttatattaattttattgttagttttgattgattttgaagatttaatatgggtaaattttttaatattatatttttttaaggaggatgattaaatagggaagggtaggggttgtaaaatttagttggtaattaagggaggtggggatgaaagagtgtattttttggtttaaatattaaaggtaaagttaagatagaatatttatttaagtttagatgttgaggtttttagtagattttgaaatatggaggtagttattatttttaaatagtgtgtttttgattatttataaataatgttaagtagattgatattaggttttttttatatttatatgtgttgtgtgtaggttgagttaaggttttttaattgattaagttaaaattttggtttttgttagtataggttagaatgtaaataggatttatgtaatttttggtgaggggaattgaaattgagtttagaggtatgagaagggggagaaatgttaagaattgaattttagtaaaattgaattaaatatgttgatattgttattttgttggttttaggttttatgtttttgaggttagtatttaagaagggatatgggtttgtgaggagttggagtttggggaattaggggatgggaaagttgggatggttgaaggttgtggtggttgaaaaagttttttgggtggggaggggggaggggtttgtatagtttttgggggagttagagttttagagaggttttattttgaggttgttgagatttttgggtgagatattattagatttgtagggtagttagatgatgttgttttttttttttatttttagaggaagaagagaataaatgtaatttttttgtttttttttgaggaatggtgatgttttttggtttattgtaggttttgggatttttttttttatgtttaatgtttttaggatttttgagaagtggttgtgtgtgtggaggggggatgtttgtttttttagaattatttattgaaggttagtaggatgtagtagaggtttagtatttatagggtttttatggtgtgtggttggtgagttttaagttttttttgattgtaggagttgtttttatttttgggtttggatttttatatttttagttgtgtggtttgtttattatattttaagtaggttgggttgttttttatttttattttttgtgggtgggggatgggaaatatgaatttattaattgtgttgtattatgtatttatggtatttaatgaggatttgtgaggggggtggaagtttattaattggagttgtttaggtgtggtgattgatgtttgaagtgtggttttttttgattggttagggtttgtagtttttttttaattaaatggttttgtgggttttttatatgtgggattgtttttttgtttgggtggttttggtttttaagggaaaatgtttaatgaatgtaagtagagaatatatttatttttttagagaggttgtggtggaattatttttggattttagagagtgtttattttgtgattggggaaatggtagttatggtaatgtgttttttatttttttttatttatgtttggggttttgttggaagtgattttagtatgatttttgtggttagtttttttgtgtggtggtgttttttggaaagaagaaatatatgagagaggttgtaaattttttagaatttttttagatggtgggggggtgggggggtggtggtggtgagaaattatagtttttggtatgtaatgttttaggggtttattgtattgaatgttgggggttgtagtttttggtttttgaggattagttgtgtagttttggtttttttttttatgtttttttagtgtgtttttgttagagttttgttttgtgttttagatgttatattttgttttgattatagtagagatatgtgtttattttaggagtttttattgtatatagtttttagaagtgggtttagaaagtttttatgttttgggtaaggttgtttggttttggggggttggtttgagtttgggggttttgtttttggtttaagagtatgagtttttgaatttgtttataagtgtgttatttgggtatttggagtgtttattttttttgtgtttttttgtggttggaatttttaggttttttttatttggtttatagaagaatgtggttgggatttttttgattattttagggaaattgtgagtagtgttgaggtttttgattttttaataaagtataaaggtggtggtgatttgatggttgtagaattttttttgtgaattaggtggagagtgtggttgtaaaagtgggtttagtatagaaaaggaaaatttttagtttaatgagtgtaggaggatgtatttgtagatatttgaaagtaaaatttgtggtgttgtatatgagaatgggattgtagttttgtaattttatagaaa

SEQ ID NO: 79 - DNA, 2497 bp, Artificial Sequence
  Description of Artificial Sequence: Synthetic polynucleotide
tgaagattgtgtggagtgggaggtttgtgtttattttttttatttattggggaatgggttgagtggttgggggtaaagtgggatttaggggttttgtttagtttttattgtaggttaagtttttttttgtggttaagagttattgggttttttatttttttttggtttttatttgtagatttagatggttttatggtgatttagaggaggatgtatttgggtgttttttttgaggatggttgtagggattatttagggattgagttgaggtgtagatatagttatggatttgggtgttgttagatatagaagggtgtgtagtaaagtgagttttatgtatgtgtagattttttttttggtttttgttttttatggaaatataattgattatattatgattgattatggtagttttttagggtttttttttttttttttttttttttttttagaagttataaagggatatagaatatatttaaagattattttatgtttttagtggagaggtaaaaaaggtttgttttggaatggggaagtggttgtgttttggatggagaggggtggggattttgtgattgtaggtggagggagggtgggtgttgttggtgtaggtggtgatagggagatattgttgttattgagtatttttatgtaagtttttttatttttttgtgtattagtgtttatattggggtaatgataaatgttgtgttgaaaaattatttgatggggttatggaaggaatggaaggaatggtgttttggtttgtttggggtttgtgtatgttgttattaagttgtgggggtgggttggaggggagagttgtgttagttaggttgttgttagatgatgagtttggggtgtgatggggtggagtatttttaaaaaagtgtatgtttaggattttgtttagtgtatttttgtgtgtggtgggttgggttgggtagttttataaatagttgtggtgtgagttttgaagggaattattagtgttttttgtttatggagttttaggtttataatggtagtggttgttagttttgtgttttttttgtgttttttgtttttgtatttgttgtttggttggttttgggtaggatgggttggtgagtttggggatgtagtttaagtagggtgggggttaaatttgggaggttgtggattgtagtgggttttagaggaggggaggtttttggaaggattggtgtgatttttttgaatgaatattgtggtttttttgaatgttgtggtttttttgaatgttgtggtttttttgaatattgtggtgtttttgaatattgttgtttttttgaatattgtgatttttttgaatattgtgatttttttagatatgtttagttgaaggtatttagttttttttggtggtttttttttgttgggtttgttttttgtggttgttgtttgttttttaggttaggaggtttttggaaggattggtgttgtttttttgaatattgtggtttttttgaatattgtggtttttttgaatattgttttttttttgagtaatgtgatttttttgaatattgtggtttttttgaaaattgtgatttttttgaatattgttattttattgaatattgtgattttgttgaatatgtttggttgaaggtatttagtttttttttgtggtttttttttgttgggtttgatttttgtggttgttgtttgttttgtaggttaggaggtttttggtagtattggtgtgatgtttttgaatattgtgttttattttaatattgtgatttttttgaatattgtgattttttttgaatattgttgtttttttgagtaatgtggtttttttgaatattgtggtttttttgaatattgtggtatttttgaatattgttgtttttttgtatattgtgattttttgaaatattgtgatttttttgaatattgtgattttgttgaatatgtttggttgaaggtatttagtttttttttgtggttttttttttttgggtttgttttttgtggttgttgtttgttttataggttaggaggtttttgggtggattagtgtgatttttttgaatattgtggtttatttgaatattgtggtttttttgaatattgtggtttttttgaatattgtgattttttagaatattgtggtttttttgaatattgtggtttttttgaatattgtgattttttagaatattgtggtttatttgaatattgtggtttttttgaatattgtggtttttttgaatattgtgattttttagaatattgtggtttttttgaatattgttgtttttttgaatgtgtttggttgaaggtatttagtttttttttggggtttttttttgttgagtttgttttttgtagttgttgttagtattgtagtttagggggagtgttaaagaaggttgaaaaggaattgtaggagggtggagggattaaaaggttatagagggtaaggtagggtggggatttttggtgtagatttgtagttttattg

SEQ ID NO: 80 - DNA, 2497 bp, Artificial Sequence
  Description of Artificial Sequence: Synthetic polynucleotide
tagtggggttgtgggtttgtattagggatttttgttttattttgttttttgtagttttttggtttttttatttttttgtaatttttttttagttttttttgatattttttttggattgtggtgttagtagtagttgtaggaagtggatttggtggaaaggagttttggaggggaattgagtgtttttagttaggtatgtttggggagatagtgatgtttggggagattgtgatgttttgggggattgtgatgtttggggagattgtgatgtttggggaggttgtgatgtttgggtagattgtgatgttttgggggattgtgatgtttggggagattgtgatgtttggggaggttgtgatgttttgggggattgtgatgtttggggagattgtgatgtttggggaggttgtgatgtttgggtagattgtgatatttggggagattgtgttggtttatttagaagttttttggtttatggggtaagtagtagttgtaggaagtggatttggaggaaaggagttgtggaggggaattgagtgtttttagttgggtatgtttggtgagattgtgatgtttggggagattgtaatgttttgggggattgtaatgtatggggagatggtgatgtttgggggtattgtgatgtttggggggattgtgatgtttggggagattgtgttatttggggggatggtgatgtttgggggggattatgatgtttggagggattgtgatgttggggtagaatgtgatgtttgggggtattgtgttggtgttattagaagttttttggtttgtggggtaagtagtagttgtaggaattagatttggtggaaaggagttgtggaggggaattgagtgtttttagttgggtatgtttggtgagattgtgatgtttggtgagatggtaatgtttggggagattgtgatttttggggagattgtgatgtttggggagattgtgttgtttggagagagggtgatgtttggagaggttgtgatgtttggggagattatgatgtttggggagatagtattggtttttttagaaattttttggtttgaggggtaagtagtagttgtaggaagtggatttggtggaaaggagttattgaggggaattgagtgtttttagttgggtatgtttggggagattatgatgtttggggagattgtgatgtttggggagatagtgatgtttgggggtattgtgatgtttggggagattgtgatgtttggagggattgtgatgtttggggagattgtgatgtttgtttagggagattgtgttggtttttttagaagtttttttttttttgaaatttgttgtagtttataattttttaggtttggtttttgttttgtttaggttatatttttgaatttattgatttattttgtttgggattagttagatagtaggtgtagaagtgggaggtatagaaggaatgtggggttggtggttgttgttattgtagatttggagttttgtggataggaggtgttgatggttttttttgaggtttatattatggttgtttataaagttgtttagtttggtttgttgtgtgtagggatatattgggtgggattttaggtatgtatttttttggggatgttttattttgttatgttttgggtttgttatttgatagtggtttggttgatgtaatttttttttttgatttgtttttgtggtttggtggtggtgtgtgtgggttttgagtgggttaggatgttgttttttttgttttttttatggttttattaaataattttttaatatagtatttattattattttagtgtaaatattgatgtataggaagatgaagaaatttgtataggaatatttagtggtggtggtgtttttttgttattgtttgtgttagtgatatttgttttttttttgtttgtagttgtgaagtttttgtttttttttgtttagggtgtagttgtttttttattttggagtgaattttttttgtttttttattaaaagtatgaggtggtttttgagtatattttatatttttttatgatttttggaaaaaaaaaaaaagaaaagaaagaaagttttagagggttattgtgattaattatgatgtgattagttgtgtttttatggagagtagaagttgagggaagagtttatgtatgtgtggggtttattttgttatatatttttttgtgtttaataatatttaaatttgtggttgtatttgtattttggtttagtttttggatggtttttgtagttatttttaaaagggatgtttgagtgtatttttttttgagttattatgaaattatttagatttgtgggtagaagttagagggaggtggagggtttagtggtttttggttgtaagggagggtttagtttgtagtaaggattgggtagagtttttgagttttattttgtttttagttatttagtttattttttaatgaatgagaaaaataggtatagattttttattttatatagttttta

SEQ ID NO: 81 - DNA, 2455 bp, Artificial Sequence
  Description of Artificial Sequence: Synthetic polynucleotide
ggattttttattttggttgtagttttttgtgtagtgagaaggtagtggtttttgagagtttagtagtgttttgggagtttgtagaatgtaggggtggattttgtgttgtattggttgttaaggggtggttgtggagggaaggggtgggttggtgggtttgatagtgggtttgtgtaggtggtagtgtttgttttttttagttttttgttttgtgttatgggtgggttttgggttttgttggttgtattttgggtgttggaagttgttgggattgttgtgttttgtattggagtttttaatatttagagttttggtgatagtaaagtgttggattttgtttgtggtagtattattgtgaaggtggggtttgggttggggtggggtggtgtttaggggtgttgattgtgttgatttttgtatttgttgtttttttttagattttggttggttatgattttgtgttggtgtaggaggtgtgagatttagattttagtgttgtgtttgtgtttatggagtagattaataggtgtggtgggtagggttttttgttgtgattttttgttgggattttgttttggtgtggtgttttgattttgagtgggtttttgtttttatagtgtgtttgagtatgagtatagttttgtgagtagttagtttttgggttgggattagtataaggagatgtatttgtttgtgtataggtgaggggtgggttgtagggaggggtgtgtggggttgtaggttgggggtttagtgggttttttttattttttaggaaagatgtggtgttggttgtggatatttatttgtatttagattttgaggatgtttttagttgtgagttttttgtggttaagtttttggtttttggtattggtgagtgggttttgtttttttttttttgttgagttttgatgtttttatttttttttgtagtagtatagaatttggtgttgattttgttgtatgtggtgttgtattaagttgtggtggagattgatgtgttttatgatgtgtatttggatgtgattgataagtggggtattgatgtaagtttattttttggttttggggtttttgtaggtgtgttttgggggtttggtttatgagggtgggattttgatggtttttgtggtggtttagatatggttttgtggtgtttgtaggatatgttgtttttgggtgattttaatgttgattgtagttatgtgtgggtgtaggattgggttgttatttgtttgaggagtagtgaggtttttaagtggtttatttttgatagtgttgatattatggtgggtaatttagattgtgtttatgattgtattgtggtttgtggtgtttgtttgtgttggagtttgaagttttagttggttattgtgtatgatttttaggaggaatttggtttggattagatttaggtgagtgggttgtggggtggtgttggttttgggtttttattgtttgggtgtatgtaggtagtagggagggtttagtgtttaaggtagggttattttagttttttttttgtattagggtttgtttttaaggattttggagagtttggtttattttatgtggagttttgggtaggtagggtattttgttttttttttaaagggttaatggtgatattttttgttttggtttttgtttttgttttattgtaggtagtagtaggggtgggtatttaggttttattggttttttttatttttgtgggtggggtgtattttttttttgaggtttattttgtttttataggtttttgttattagtgattattttttagtggaggtgatttttaagttttattgatgatttgaggtttggttggggtatgttatttgtagattttggttttgaggaatggtttaatagtggtttttttagggtggtagttattttttagtgaggttttaaggtagagttggttgggtgtggattaggggttatggatatgtgatgtgttgttttgtatttttgttttttatttgtgggatgggttgtatttagtgattttatggggtgttgtgagttttatgaggggtgtagggggtattgtttggtagatgtttgtttaataaatgagttgtttttggttgggttttatagtttggtttttaggtttttgtttttttttaggatttagttttagttttttaggggtagttatggtttgggttgtttattttatgttttggtgggatgtggttgtttttggagtttgttggttttagaaggtagtttagggatgttttttgtttattttttgtggaaattataaatgtttttaggagtttgtattgtgagtatagttgggatagggatggtgttaatatattagttttttgggtttttggggtttttagaatagttttttttaggtttattttgtagtttttattttagggttttgtaggggtttttaggtatttgtttgttttaagagtttggt

SEQ ID NO: 82 - DNA, 2455 bp, Artificial Sequence
  Description of Artificial Sequence: Synthetic polynucleotide
attgggtttttgagatagataagtgtttgggggtttttgtagggttttggaatgggggttgtggggtgggtttggggagagttgttttgagagttttgagggtttaggaggttggtgtgttggtgttatttttgttttagttgtgtttatagtataggtttttgggagtgtttgtagtttttatagaggatgagtaaggagtatttttgagttgttttttggggttagtaggttttgggggtagttatgttttattaggatatggggtgggtagtttaggttatggttgtttttaaggagttgaggttgggttttgaggaaggatagaggtttgggagttaagttgtggggtttgattgggagtagtttatttattgagtagatatttgttgggtagtgttttttgtattttttatggggtttataatattttatgaggttgttggatgtagtttgttttatagatggggaatggaggtatagagtagtatattatgtgtttatggtttttggtttatgtttagttgattttgttttggggttttattgaagggtggttgttattttgaaggggttattgttgggttattttttagagttagggtttgtaggtggtatgttttagttaggttttgagttattggtggaatttgagggttatttttattggaaagtggttgttgatggtaagagtttgtggggatagagtgaattttaggggaaaagtgtattttatttatagggatgggaggggttggtgaggtttgggtgtttatttttgttgttgtttgtggtggggtaggggtaggggttggggtagagggtgttattattggttttttgagggaaaggtaaggtattttgtttgtttagagttttatatggggtgggttgggttttttagggtttttggaaatgagttttggtgtagggaggaagttgaggtggttttgttttgggtgttggattttttttgttgtttgtgtgtgtttgggtggtggggatttaagattagtattgttttatggtttatttgtttgagtttggtttaggttgaattttttttggaagttgtgtatggtggttgattggggttttaggttttggtgtaggtgggtgttataggttataatgtggttgtaggtgtagtttgagttgtttattgtggtgttggtgttgttagggatgagttatttgaagattttattgttttttagatggatggtggtttagttttgtgtttgtatatagttgtagttggtgttgaagttgtttaggaatagtatgttttgtgggtgttgtggagttgtgtttgagttgttgtaggagttgttgaggttttgtttttatgaattagatttttggggtgtgtttgtagggattttgggattgaggggtgggtttatgttggtgttttatttgttgattatgtttaggtatatgttgtagagtgtgttgatttttgttatggtttgatgtggtgttgtgtgtagtgggattagtattaggttttgtgttgttgtgggaaggggtgggggtgttagagtttggtgggaggggaggggtggggtttgtttattggtgttgggggttgagaatttgattatgaagggtttgtggttgaagatgtttttggggtttgggtataggtaggtgtttatgattgatattgtgttttttttaggagatggggaggatttgttgagtttttgatttgtggttttgtgtgtttttttttgtggtttgttttttatttgtatatgaataggtatatttttttgtattggttttggtttaggggttggttgtttataaagttgtatttgtgtttggatatgttgtggagataggggtttgtttagggttggggtgttgtgttggggtgagattttggtggggggttgtgatgaggggttttgtttattatatttgttgatttgttttatgagtgtggatatggtgttgaggtttgggttttgtattttttgtattagtgtgaggttatagttagttaggatttggggaggagtggtgggtgtgggggttagtgtggttagtatttttaaatgttgttttgttttggtttgggttttatttttgtgatgatgttgttgtaagtggggtttgatattttgttgttattgaagttttgaatgttgaaggttttgatgtgaagtgtggtggttttggtggtttttagtgtttagagtgtggttagtagagtttggggtttgtttatggtgtggagtgagaggttgggagggatagatgttgttgtttatgtagatttgttgttagatttattgatttattttttttttttgtggttgttttttgatggttagtgtgatgtggaatttgtttttgtgttttgtaggtttttagggtattgttgggtttttagggattgttgtttttttattgtgtgggaagttgtagttggaatggagggttt

SEQ ID NO: 83 - DNA, 2738 bp, Artificial Sequence
  Description of Artificial Sequence: Synthetic polynucleotide
tgtattgttgagggttattgattattgagaattaggtttagtttttagaggaagtgttagaggagggggagggtgggtgagggttttggggtggtgggggtgttggttttagtatgtggaggtgataggatttgtaagattttatgtgttgttggggtaggattgtatagggttgttatttatttatttggggtgtttttaatgggtatttgtgtattttagtttgtgtggtgagtgtatgtatgttgttgttgttgtgtttatatggttttttaaagttgggggaggggttgtggagtgaaggagttgtaggtagattttttttttttttttgagttgggaaaagggttagttttgtgttttgtatgtttggttttgttttgtagtttgttggtgagttaagagttggtagagtagaggaggtgtatggtttgggttgtgttattattttttggtttgttgatttggttaggagttggggatggtggtagtattgtggaggtatgttttgtgttgtttttatgtttttttttgaaagtagtgtttttagggggaaagtttgtaatgttatttgttttgttggtaaagttttgggatgttgggtattttttgaggagggggaagatgtggtatttttattgaggttggtaggttaggaagagaagttttttgggtgtagggtgtagtttagttttggggattttttgggttttttgtgtgttggttgggatgaagtgtgttttgtattggatttgggatttgggggtgggggttggtgttggtagtgttagatgttgttttatttttttttgattttggggaggatagtaataagttttgttttagttattttattattttgttagtatgtgtagattttgggtttttggagtttggtgtggattttgttttgttttgtgtttttttttgtatgttttgtgttattttaagagtttgtgtggttttgggtgggtgtttggtttttggtgaaatgtttggggtgtgttgtgtgggtgtatggtgtttttttttagtagtttttggttgtgggggtatatgtatttatttgtattttgtagggataggtggtttttttgttgggagtttttgttttggggatttttgggtgggttggtggtgttggttttttgtgttgggttaaaggtggttaatattaaagttagggttatgaattggtttagttgtttggtatatatggtttttggtattaattttttgttgggagatttggattttttgtgtttttttttttttttttttttttttttttttttgttgtttttttttttttttttattttttttttttgtttgtttttttttttttttttgtggttgtggtttggatagaggttatttagtgtttttttgtagttttttggagagtatgtgattaggttgttagtagtgttgtgagtgtttggtaatggtagggatggtgttttaaatatttttggaagttttggtgttatttgaatgaaggagttgagtaggtgttgttttggtggttggattaatttgagattttggtttttttgataatatggttgggaggtggggtttgtgtttaattattataggaggaagttgagtgttgttgggagtgttggataaagttgttgatttggtggtggttatgtgtttgtgtgtgtgtgtatgagtgtgtgtgagtgtggttggagatgtgtgtgtgtgtgtgggtgttttagggtaatggttgaaaggattgtataatataagagtgaatttaagttttagttgttgttaaagggggatggtgtgttttgggatagtgtttttggggtttttggtttgtgttatatttatattgggttgggaaagttttttttttttgttgtttggaatttagtgagatttttagtttagaggatttgataaattgaagtagttttttaggtataatgatgttgtgggttaattgagtatatatgggaatttttggttttgtgatattttgtattaaaaagaattttatgattgaagataggagtagaagtattagatatagtatttggtttgagtaattgttttatttttttgttttggtgggttgtgtaatatttggagtgttgttttttgttttttttttaatttagatgtattttaggttgggttgtagggatttaggtgatagttaggatttgtattatttttaggagggtggtagggaggtttaaggtagttttgagttagtttgttgtggagtattgtgtgtttggaggttagagtttgaaaggtaattttatgtgtttttaaatatatttttgtatttttttaaagtgttgtttgttattttgttttgggtttttttttattttttagttatttgatggaagtggtgagaataaaaataaagataaaaaagttaaatttggggaagttatttttattttttttttttttttgtttggttttttttttaagaattgttgggttgggatagtttttggttatttttttatttggtttgtggagggaaggagaaagttgggtgttgtttggagtgtttttttttttgttgtgtgtgtatgtgtgtatgtttatgttttttttgtgttggggttggggataggaattgtttttggttttgttattttatggtgtagtttggggggtttgtagggttgggggagggtggggatatgagtgttgtgtttaagtgttttagggtatgtatttggtgttggtgtgtatttg

SEQ ID NO: 84 - DNA, 2738 bp, Artificial Sequence
  Description of Artificial Sequence: Synthetic polynucleotide
tgagtgtgtgttaatgttgggtgtgtgttttggggtgtttgggtgtggtgtttgtgtttttgtttttttttagttttgtgagttttttgagttgtgttgtggggtgatgggattgagagtagtttttgtttttggttttggtgtgggggagatgtgagtgtgtatatgtatatatatagtaggggaagaggtgttttaagtggtgtttaattttttttttttttttatgggttgggtgagaaagtagttgggggttattttgatttggtggtttttggggagggggttgaataagaaaagggaggagatggagataatttttttggatttagtttttttgtttttgtttttgtttttattatttttattggatgattggagagtaaaagggaatttggagtggggtggtgagtagtgttttgagaaaatgtaggagtgtgtttggagatgtgtaaagttgttttttaagttttggtttttgggtatgtgatgttttgtggtgggttgatttagggttgttttgggtttttttgttatttttttggaaatgatgtaagttttgattgttatttggatttttgtagtttagtttggaatgtgtttggattaggggaaagatgagaaatgatattttaggtgttgtatggtttattaaagtgggaagatagggtagttgtttagattaaatattgtatttagtgtttttgtttttatttttaattgtggggttttttttaatgtaaagtgttataaggttaggaatttttatgtgtgtttagttggtttatagtattattgtgtttaggaaattgttttaatttattaagttttttgggttgggaattttattgaattttaaatggtggaaagaggaaatttttttaatttgatgtgggtgtgatgtgagttaggggttttagggatattgttttagagtatattgtttttttttaatagtaattggagtttggatttgtttttatattgtatagtttttttgattattgttttggagtatttgtatatgtgtatgtatttttggttgtgtttatatatatttatatatatgtatgtaaatgtgtggttgttgttaggttggtaattttgtttggtgtttttagtggtgtttggtttttttttgtagtagttgagtgtaggttttgttttttggttgtgttgttaaaagggttggggttttggattggtttagttgttgggataatatttgtttgatttttttatttaagtgatattagagtttttagggatatttgaggtattatttttgttattgttgggtatttgtggtgttgttaatggtttggttatatgttttttggagagttatgggagggtgttgggtaatttttatttgagttgtggttgtgaggaggagggaaaaggtgagtaaaaaggaagagtgggaggaggaggggaagtggtgaaggaggaagaggaggaggaggaagaggggagtataaaggatttaggttttttgatgggaggttaatattaagaattatgtgtgttgagtggttgggttagtttatgattttggttttggtgttggttatttttgatttggtgtgggggattgatgttattaatttatttgagggtttttaagataggagtttttagtagaaaggttgtttgtttttgtagaatataggtaagtgtatgtgtttttgtagttgggagttattgggagaggatattgtgtatttatgtggtgtgttttaggtgttttgttgggagttaggtgtttatttagggttatgtaaatttttgggatggtatgggatgtgtaaagggaagtgtgaggtaaggtgaggtttgtgttgggttttgagggtttggaatttgtatgtgttagtagggtgatgaaatggttggggtaggatttgttgttgttttttttagggttgaggggaaatgaagtagtgtttgatgttgttagtgttagtttttgtttttgaattttgggtttggtgtaaagtgtgttttattttggttggtatgtgggaggtttagagggtttttggagttgggttgtgttttgtgtttggagaatttttttttttggtttgttggttttagtaagggtgttgtgttttttttttttttaaaagatgtttgatattttagaattttgttggtgagataaatggtattgtgaattttttttttgggggtattgtttttggaagggagtgtgagggtagtgtaaagtgtatttttgtggtgttgttgttatttttagtttttggttaggttagtaagttaagaaatggtgatatgatttgaattgtgtgttttttttgttttattggtttttggtttattggtaagttgtaaagtagagttaggtgtgtagggtatggggttggttttttttttagtttggaaagagaaagaaaatttgtttatagtttttttgttttatgattttttttttgattttggggggttgtgtgaatgtggtagtggtggtgtgtgtgtgtttattgtatgagttggaatgtatgagtgtttattagggatgttttaagtgagtgaatggtggttttgtgtggttttgttttggtggtgtgtggggttttatggattttgttgtttttatatgttggggttggtatttttattattttgagatttttgtttatttttttttttttttggtgttttttttgagaattgaatttgatttttggtggttggtgatttttaataatata

SEQ ID NO: 85 - DNA, 2401 bp, Artificial Sequence
  Description of Artificial Sequence: Synthetic polynucleotide
gtggtaggtgaggtggggtgtaggtgtgagtggggtgggaggaaggggaaaggattggggttgttgtagtttttttggttagttttgttgggttttgttagttttgtttgagattgaggtgtatggattagtggttgttagtattttataggtggaggatattttttgtgttttaaggttaatgttattttgatgggttttgtgttgttttgattttttttgatttaattttttggttatgatttttttattttttgggttttgtttttgttagtttttgttgatgttgttttttttgttgtttgtttgggtttttttatttgtttttttttttttttggtttgatggttttattgaggtaaaaataaatagttttgagggtattttaaggagtgtgtagtggttttgatggtatttttggggggataaaagaggtggttagttatgttgttggtttttggttgaataatgggtgtgtagtagattgttagggggtatttgaaatttgaggggagggaaatatttgagtgtggtttttttttgtgaggatgtatgatgtagttttgtggattgttttttgtttgtttttttttatgtattttttttttgtgtggaattatttaaatgggagatttttggtagttttatgttaatgtgttgaataaaggtaatggtttgtgggtgggaggtttggaaggtgtttggggttgggttgggtggggtggtggttaggtgggttgtgtgtgttttttgtgtgtttttgggattgatataataattttttatttttgtaaatataaagttttttattggtttgggttgggtgtatttggtgtagggaggtgttggtttttttgggtggtgggtattgtagtggtaatgtatggtttttgttggttgtggtttgggggattgagggttgggagtgggggtttttgtgaagttagaagagaagtttgtagtagagtggtgatgaggggtgttgatattttatttttaatgttgatgtttttaaatgtgatattttttgtggggtgagaatgtgggtttgtttggttttttttgtgaggttagggttttttgtttttttagatattttaaggagttaatttttttgtagaagttttttgtttttgtttttatttttaagttttgtgttttttataaattttttgttgttttgattttgatttttagttgtggtgagggttagagtgaattttggtgtgttttttgatggtatttttgtatattaggataggagaaattggagggtttggggttttgggttttgtagttgttggaggaagaatttattgtggggtttgtaagggaaagtgaagaggtttgggatttttttaaagtgttggttaggattttgaaggaaggggaggagttatttgaagttggggaaggttttttgggtgttttgttttggatttttatgtttattgatttttgtgaagtttttttggaggggggtaaatttgtgttgttttttttaatttaattttatgtggtttattttttgaattgtgtgtgttaaggttggtgttgggggtgtattgtgatggtgttttgttttttttaggtgaagataaatattttgatttgatgtttttatgtatgtgggtgtataggttttgagaaaattatgtagaaggtggttgtgatttatggtttgggttgggttatatttgtttggaggttgttggtgtgtgtgtgtgtgtgtgtgtagtttaattttttttagttttgggtggtgaaattagtttttaatattagtattttttaagtttttatttattttgattgtatttgtttgaaagtagattttatttatgttagtaagattggaagttataaataaagaaaaagaaatggatttattgaattttagtattttagtagtgtttaatagatttttttggttaaatttagagttttgtttgaatttatttatgtaggagttgttttgttttttttgttggtagaggtgttggttttttatttttatggtttatttataattatgggtgttgttatttttaaaggatttataaggtgattaattttttgttatttgttgaatggaaggagtgttatatatgtaagattgaatggggtaggttgagtttttgttttatgttattttataatttagatgggatttgtgattagaaaataaaattggttaaagttgttttggaattttttttttatttttaattttattagtattattaattagagtttaaaagagtaaggaaataatattagttatttttagatagaaatatgtttataaattttagataaatttattttaagatttttaatttttggggagattagtatttattatagtatttttaaaattagggtgagattttttaaaata

SEQ ID NO: 86 - DNA, 2401 bp, Artificial Sequence
  Description of Artificial Sequence: Synthetic polynucleotide
tattttgaaaagttttattttagttttaaaaatgttgtggtgagtgttagtttttttaaaagttagaaattttaaaatgagtttatttaaaatttataaatatatttttatttaaaagtaattgatgttatttttttgtttttttgagttttgattaatagtgttgatgaaattagaagtgggaaaaggattttgagatagttttggttaattttattttttaattatgaattttatttggattgtagaatagtatagggtgggggtttggtttgttttatttggttttgtatatgtaatattttttttatttaatagataatagagagttagttattttgtgaattttttaaaaataataatatttataattgtaaataagttgtggggatgggaaattggtatttttattaataaaaaaaataaaataatttttgtgtgagtgaatttaaatagggttttgaatttagttaagggaatttattaaatgttattgagatattgagatttaatgaatttgtttttttttttttatttgtggtttttagttttgttagtgtaaatgaaatttgtttttagatgggtatagttaaaataaatggaaatttgaaaggtattagtattggaaattaattttattatttggggttggaaggagttaggttgtgtatgtgtgtatgtatatattagtgatttttaagtaggtgtagtttagtttgggttgtggattgtagttgttttttgtgtgatttttttagaatttgtgtatttgtatgtatggggatattgggttgagatatttgtttttgtttgggaagagtaaagtgttattatagtgtgtttttgatgttggttttggtgtatgtgatttggagaatgggttgtgtgaagttaagttgggggaaatagtgtggatttgtttttttttaggggggttttgtgaaagttagtgaatataaggatttaaggtagagtatttaaggggttttttttggttttaggtgattttttttttttttttggggttttggttagtgttttggaaaaattttgggtttttttatttttttttgtggattttgtggtgggttttttttttgatgattgtggagtttgaggttttaggttttttaattttttttattttggtgtgtggggatgttgttggggagtgtgttggggtttattttgatttttattatggttggaaattaaagttaaggtaatagggagtttgtagaaagtgtgaagtttggaaataagagtagaagtggggaatttttgtggaggagttggttttttggggtgtttaggagaataggaggttttggttttatgggaggagttgggtgggtttgtatttttattttgtagagggtattgtgtttggagatgttggtgttgggggtgaggtgttagtgttttttattattattttgttgtagattttttttttggttttatagaagtttttatttttggtttttagttttttgagttataattggtaggaattgtgtgttattgttgtagtgtttgttgtttggagggattagtgtttttttgtgttgggtgtgtttgatttgagttggtgagaggttttgtatttgtaggaatgaggggttgttgtgttagttttaggggtatgtgagagatatgtgtagtttgtttggttgttattttgtttggtttggttttaggtattttttgggttttttgtttgtgggttgttgtttttgtttggtgtattagtataaagttgttagggattttttgtttagataattttatataaaaggagagtgtatgaaagagagtgaataagggatgatttgtgaggttgtgttgtgtgtttttgtggggagggattgtgtttaagtatttttttttttttgagttttaagtgttttttggtaatttgttgtgtgtttattatttggttgggggttgatggtgtggttggttattttttttatttttttgagagtattgttggggttattgtatgttttttgaagtgtttttagggttgtttgtttttgttttagtgggattgttgggttagggagggaggagagtgggtaggaaggtttgggtgggtggtgggaagggtgatgttggtgaaagttggtagaggtgaagtttagaaggtgagaaagttataattaaagaattaggttagggagagttaggatggtatgggatttattgggatgatattgattttggggtgtaagaggtgttttttatttgtgaggtgttggtggttgttagtttgtgtgttttggttttaaatggaattgataaaatttagtgaaattgattagaaaggttgtggtgattttgattttttttttttttttttattttatttatatttgtattttgttttgtttgttgt

SEQ ID NO: 87 - DNA, 2476 bp, Artificial Sequence
  Description of Artificial Sequence: Synthetic polynucleotide
aattattaggaggttgggggaaaagaggggaaaaatgggtaaggaaggttgtaaatgttaagatgttaaataggaatttaattgaagtttgaagtgaaatatagttttttttggtttaattgttatgtaaataatttttaagtatttttagatgtaaagaaaaatagttattgtgtataggtgttagttgaatgtttgagagttggatgaatggggaagatttgttatatatttagtggtgggtggattttattaggttgtagtttttatatagtttttttttgttgtattgtagaggtgttattttttttgttttaatttttatttaatttgatttttttatttgtattttaaaaaaaagattttttggattttttttagtattttgtgtttttaggggaattaaattagagtttttagagttgttagggaagaggttgtgttttaattagataaatgtttttttggatgtataggatagagtttgtgtttttttattatttgttattgttttttttagatgtatattttattttttgttttattttttttttgttaaggattttatagtttagtatagaattaagttttggaggtgatttgagggtgggaagtagaggggttttgaggttttgttagaagttttggtagtgtttttgtttttttttaggtggatgtgtagttttgggaagggagttgggtgggagttttggtggtgtattgagattaatgtggtttggtttatggtgagggtggggtgttgtggtttttgtttttgtggattttttgttttttagatagagtttagggtgtgagtgaatttttgggatgtttagatttggggaaggtgtggggtggttatgggtttttgattttttttattttttgtaagttatataaaagggagatgtggatatgtataaagtttgtttgtggaaggtggtgtgtgattttgatgttggtttgggttagggttgtatttaggttgttgttgttagtagttgtgaaaagaggttggagtaaggaagggggatgggggtgagagaggaaggtgaaatgaggtggagaatgtagggaaaagtgaggggtttttagttttttgggttgttttgattttttttttttttttttagggtttaagagaaaggaaagggtaatgatttaagagtgaaggattggttttagggatgttgtgtttttggttttttttatgtgttttttttttttttttttttgtttgaatgttttttgttttttttgatttttgtttttaaggtagggattaagttggggtttgggtttagggttgttttttattttttttgttttgggttggtgtggaattagggagattagtgttttgtttgtttttttttagtgggttggagtgtgattttttggggtagggttgggttgaaagtggggatgtgttggatgtttgtaagtgggggtggagaggagaggggttttattgatggatttttggtttttttgtattaaagatttgggttaaggttttggggggtattgtgtttttattgtgtagtttttttttgttttttgaggtgtggtatttatttttagtgtttgagttgtttaggtggttagtaggagtagtgttaaattgggtagtattgtgattttgtgtggggtattgagtgtgttgttgtgtgagtgggatttgttgtgtttttgttttgtttgtgttgttattgttgttgttttttggggtttttgtgtatgtttttttgtgtgtttttgtttattgttgttgaggaaattgatggagtttgagtgtggtggtggggtttagagttaggtgagttagttgatttggtttattttgtttggtatttgagagagatttttagtggtgttgttggggaattgtgtttgtttgtgttgggaggggtttttgtgttttgtgtttataggtgtatgtgtttttggtgttgtttgtattttatgtgttttttttgttttttggttgatggtttatttgggttttgtgaatagtgggagggagagtttggggttaggagagggatggtgtaggattagggaaaggtgagttttaggatgttgaggttttagaaaagttgagagtgtttttgtttgtttttgtgagtttgaattatttgattttgtaggttttttgggggtgttgtataaaggattgttgttagggtgtgtttttatttgtattttgtttttttttttggtttggagaggtggggtaggtgtttttggaagagaatgagaatgagtgaagtttaaaggaaataggattttttttgtttgttgagatagtaaaattttattttttaatttttaatgttaaaagtaggtatgagtaatttggaatttttatttttagaatgaattaaaggagtaaggtgtaggatttggtaaagaagtggttaatttatttatttttttttgaaagtagggttttgggtttgggttttgttttttt

SEQ ID NO: 88 - DNA, 2476 bp, Artificial Sequence
  Description of Artificial Sequence: Synthetic polynucleotide
aaagaaataaaatttaagtttagaattttgtttttaagaagaagtaaatgggttggttgtttttttgttaggttttgtgttttgtttttttggtttgttttaaagatagaaattttaggttgtttgtgtttgtttttgatgttgggggttaaaaaatgaggttttgttgttttaataagtaaagaaaattttattttttttaagttttatttgtttttatttttttttagaaatgtttgttttatttttttaaattgagagaaaaaatgaaatgtggataaaaatgtattttagtagtagttttttatatgatatttttgggaggtttgtggggttggatgatttaagtttatggggatgagtaggagtgtttttgatttttttagagttttagtgttttaggatttatttttttttgattttgtattgttttttttttggttttagatttttttttttattgtttatgaagtttaggtgggttgttggttggggagtggagggggtgtgtggggtgtaggtggtgttaagggtgtgtgtatttgtgggtgtggggtgtgagggttttttttggtgtgagtgggtgtagttttttggtggtgttgttaggggttttttttgggtgttgagtggggtgggttggattagttgatttgtttggttttgagttttgttgttgtgtttgggttttgttagtttttttggtagtggtaggtgagagtatgtggaggagtgtgtgtgggggttttgggagatggtggtggtggtggtgtgggtagagtaaggatgtggtggattttatttgtatagtagtgtatttggtgttttgtgtagggttgtgatgttgtttggtttggtattgtttttgttggttgtttggatggtttgggtgttggaggtgggtgttgtgttttggaaggtggggggaggttgtatggtggggatgtgatattttttaagattttaatttaagtttttaatgtagagaagttgggggtttgttaatgggattttttttttttttgtttttgtttgtggatgtttagtgtatttttgtttttggtttagttttgttttagggagttgtgttttggtttgttgagagggagtgggtgaggtgttggtttttttggttttgtgttagtttggggtgagaagggtagggggtgattttgagtttagattttgatttagtttttgttttggaagtgggggttgggggaggtgagagatatttagataggggggaagggggaaggagtatgtggggaaaattgaaaatgtagtgtttttaaagttagttttttgtttttgaattgttgttttttttttttttttgggttttggggaggaggaggaggagttgggatagtttaggaagttaggagttttttgtttttttttgtgttttttgttttgttttattttttttttttatttttattttttttttttgttttaatttttttttgtggttgttggtggtggtagtttgggtgtgattttagtttgagttggtgttggggttgtgtattgttttttataggtaaattttgtgtatgtttgtgttttttttttgtgtaatttgtgagaaatgggaggggttggagatttatagttattttgtgttttttttaagtttggatgttttgggagtttgtttgtattttaagttttgtttgagaggtagaaggtttgtgggaataaaagttgtgatattttgtttttgttgtgggttgagttgtgttagttttagtgtgttattgaggtttttgtttggttttttttttggggttgtgtgtttgtttgggagggggtagagatgttgttggggtttttggtggagttttggggtttttttgttttttatttttggattatttttgaggtttaattttgtgttgggttgtaaagtttttggtggggaggaaataaggtggagagtgggatgtgtgtttggaaagggtagtggtggatggtggggaggtatgggttttgttttgtgtatttaaggaggtgtttgtttgattaaggtgtggttttttttttggtagttttggggattttggtttagtttttttgggggtataggatgttggggagggtttgaagggttttttttttagggtgtagataaaaggattgaattgagtgaagattaagatggagaagatggtgtttttgtagtgtagtaaagaaaagttgtgtggaggttgtagtttagtgaaatttatttattattaggtgtataataagttttttttatttatttaatttttgaatatttagttaatgtttgtgtataatgattgtttttttttatatttgaagatgtttagaagttgtttgtatgatagttgggttagaggaggttgtattttattttggattttggttgggtttttgtttggtattttaatatttgtaattttttttatttgttttttttttttttttttttagttttttagtaatt

SEQ ID NO: 89 - DNA, 16 bp, Homo sapiens
accaccaccaccacca

SEQ ID NO: 90 - DNA, 16 bp, Homo sapiens
caccaccccccccacc

SEQ ID NO: 91 - DNA, 16 bp, Homo sapiens
ctcggttcgtacccgg

SEQ ID NO: 92 - DNA, 18 bp, Homo sapiens
gggggggcggggcgtgga

SEQ ID NO: 93 - DNA, 18 bp, Homo sapiens
tttagccggggtattcca

SEQ ID NO: 94 - DNA, 16 bp, Homo sapiens
gaagttcagaccttga

SEQ ID NO: 95 - DNA, 16 bp, Homo sapiens
ctcgcgcgctcgcctc

SEQ ID NO: 96 - DNA, 17 bp, Homo sapiens
ctgttcctgtggttccc

SEQ ID NO: 97 - DNA, 16 bp, Homo sapiens
acctgctcctgtccta

SEQ ID NO: 98 - DNA, 16 bp, Homo sapiens
tgcgccgccgctcccg

SEQ ID NO: 99 - DNA, 16 bp, Homo sapiens
ccgcggcggcgggcgc

SEQ ID NO: 100 - DNA, 16 bp, Homo sapiens
ggcgccgaggtcgcag

SEQ ID NO: 101 - DNA, 17 bp, Homo sapiens
agggcctcgatttccgg

SEQ ID NO: 102 - DNA, 16 bp, Homo sapiens
tggaacgtgcgactgt

SEQ ID NO: 103 - DNA, 16 bp, Homo sapiens
ctctggcgcgcctata

SEQ ID NO: 104 - DNA, 17 bp, Homo sapiens
agattctcacgacccga

SEQ ID NO: 105 - DNA, 16 bp, Homo sapiens
ggacaaggacatattg

SEQ ID NO: 106 - DNA, 16 bp, Homo sapiens
tccgtcggcggtagag

SEQ ID NO: 107 - DNA, 16 bp, Homo sapiens
gaccgcgggcacgtct

SEQ ID NO: 108 - DNA, 16 bp, Homo sapiens
ctaacgccgctggtta

SEQ ID NO: 109 - DNA, 16 bp, Homo sapiens
cccgcgcgaagaccca

SEQ ID NO: 110 - DNA, 16 bp, Homo sapiens
cccgacaccgtgacgg

SEQ ID NO: 111 - DNA, 16 bp, Homo sapiens
agaacacggccgcaga

SEQ ID NO: 112 - DNA, 16 bp, Homo sapiens
cactcctgcgcacggg

SEQ ID NO: 113 - DNA, 16 bp, Homo sapiens
ccacggtgaaggcgga

SEQ ID NO: 114 - DNA, 20 bp, Homo sapiens
cccgggaccaacaccgagat

SEQ ID NO: 115 - DNA, 17 bp, Homo sapiens
tcccggtctccgccaac

SEQ ID NO: 116 - DNA, 16 bp, Homo sapiens
tgtgcgaagttaacgt

SEQ ID NO: 117 - DNA, 16 bp, Homo sapiens
aagttcaccggcgtct

SEQ ID NO: 118 - DNA, 18 bp, Homo sapiens
acttcggaacccaagcgt

SEQ ID NO: 119 - DNA, 16 bp, Homo sapiens
tactccacgttcaggt

SEQ ID NO: 120 - DNA, 16 bp, Homo sapiens
cccgggaggatgagct

SEQ ID NO: 121 - DNA, 16 bp, Homo sapiens
tcccaggggtttccgt

SEQ ID NO: 122 - DNA, 16 bp, Homo sapiens
agacggggcccacgag

SEQ ID NO: 123 - DNA, 16 bp, Homo sapiens
tgccggtaccagcgct

SEQ ID NO: 124 - DNA, 16 bp, Homo sapiens
tggcccacgctcggca

SEQ ID NO: 125 - DNA, 16 bp, Homo sapiens
cccgcacggtcaggcc

SEQ ID NO: 126 - DNA, 16 bp, Homo sapiens
acagcgacttcggcga

SEQ ID NO: 127 - DNA, 18 bp, Homo sapiens
ggcgtctcacctacgaga

SEQ ID NO: 128 - DNA, 17 bp, Homo sapiens
atcgtggacggcaacga

SEQ ID NO: 129 - DNA, 16 bp, Homo sapiens
ttgagatcgacccgtc

SEQ ID NO: 130 - DNA, 16 bp, Homo sapiens
ggcgagatccgcacgc

SEQ ID NO: 131 - DNA, 16 bp, Homo sapiens
tgacgcccgtggtgga

SEQ ID NO: 132 - DNA, 16 bp, Homo sapiens
gtgaccgaccacggca

SEQ ID NO: 133 - DNA, 16 bp, Homo sapiens
atcatccgctcggtga

SEQ ID NO: 134 - DNA, 16 bp, Homo sapiens
catcgccgtcaagtgc

SEQ ID NO: 135 - DNA, 16 bp, Homo sapiens
tgcaagcgcgagaaca

SEQ ID NO: 136 - DNA, 16 bp, Homo sapiens
ctcgttgctggcttgc

SEQ ID NO: 137 - DNA, 16 bp, Homo sapiens
ttttaaaaattactgt

SEQ ID NO: 138 - DNA, 17 bp, Homo sapiens
gagagcgctcacgtgga

SEQ ID NO: 139 - DNA, 16 bp, Homo sapiens
catttcgtttgatgta

SEQ ID NO: 140 - DNA, 16 bp, Homo sapiens
cctatggaggattctt

SEQ ID NO: 141 - DNA, 16 bp, Homo sapiens
ccgcgcctatttctaa

SEQ ID NO: 142 - DNA, 16 bp, Homo sapiens
tgaaagccgagggaga

SEQ ID NO: 143 - DNA, 16 bp, Homo sapiens
aggccaagatgagcgg

SEQ ID NO: 144 - DNA, 16 bp, Homo sapiens
ccgcatcctcgggtcc

SEQ ID NO: 145 - DNA, 16 bp, Homo sapiens
gcaccgcctgattccg

SEQ ID NO: 146 - DNA, 16 bp, Homo sapiens
gcgagcatcagcccac

SEQ ID NO: 147 - DNA, 16 bp, Homo sapiens
agagacgcgaaaaacc

SEQ ID NO: 148 - DNA, 16 bp, Homo sapiens
agacgaaagagccgcc

SEQ ID NO: 149 - DNA, 17 bp, Homo sapiens
gacgtgaactttcggaa

SEQ ID NO: 150 - DNA, 16 bp, Homo sapiens
aatgcgtggccgcctc

SEQ ID NO: 151 - DNA, 16 bp, Homo sapiens
tcccgcctgcggaact

SEQ ID NO: 152 - DNA, 16 bp, Homo sapiens
tgttcgacgtgattct

SEQ ID NO: 153 - DNA, 16 bp, Homo sapiens
caacgtctttccgggt

SEQ ID NO: 154 - DNA, 17 bp, Homo sapiens
tgttgatccggaaatga

SEQ ID NO: 155 - DNA, 16 bp, Homo sapiens
aggaggcgcgggcgaa

SEQ ID NO: 156 - DNA, 16 bp, Homo sapiens
cccgcgcgccctgcct

SEQ ID NO: 157 - DNA, 17 bp, Homo sapiens
ccggaccccgacaggta

SEQ ID NO: 158 - DNA, 18 bp, Homo sapiens
tgggacccggagccggag

SEQ ID NO: 159 - DNA, 16 bp, Homo sapiens
aacaaagcaccctgcg

SEQ ID NO: 160 - DNA, 16 bp, Homo sapiens
caccgcccaccgcctt

SEQ ID NO: 161 - DNA, 16 bp, Homo sapiens
ctgcgctgcccagagg

SEQ ID NO: 162 - DNA, 16 bp, Homo sapiens
aagcttcgtttgggag

SEQ ID NO: 163 - DNA, 16 bp, Homo sapiens
ctggaagccgaagaga

SEQ ID NO: 164 - DNA, 16 bp, Homo sapiens
gatcgcaccctgtatc

SEQ ID NO: 165 - DNA, 16 bp, Homo sapiens
tagggacccgcggagg

SEQ ID NO: 166 - DNA, 18 bp, Homo sapiens
ttgccgagtaatcctcgc

SEQ ID NO: 167 - DNA, 16 bp, Homo sapiens
cactacgggcggaggg

SEQ ID NO: 168 - DNA, 16 bp, Homo sapiens
gacggcacgccagagg

SEQ ID NO: 169 - DNA, 16 bp, Homo sapiens
ctgggcgtcgccacca

SEQ ID NO: 170 - DNA, 16 bp, Homo sapiens
caccagcccggccgcc

SEQ ID NO: 171 - DNA, 17 bp, Homo sapiens
ccatcacgtccagcgac

SEQ ID NO: 172 - DNA, 16 bp, Homo sapiens
acagcgagtgcgacat

SEQ ID NO: 173 - DNA, 16 bp, Homo sapiens
aaagtgtgggaaagtt

SEQ ID NO: 174 - DNA, 17 bp, Homo sapiens
tagacgtggggctacgc

SEQ ID NO: 175 - DNA, 18 bp, Homo sapiens
acctcggggcagtaccgc

SEQ ID NO: 176 - DNA, 16 bp, Homo sapiens
atggcggtgtcgtgga

SEQ ID NO: 177 - DNA, 21 bp, Homo sapiens
ttgaggcgcgcgtagaggact

SEQ ID NO: 178 - DNA, 16 bp, Homo sapiens
aacccgagctgcacag

SEQ ID NO: 179 - DNA, 16 bp, Homo sapiens
taggtgcgcgttacat

SEQ ID NO: 180 - DNA, 18 bp, Homo sapiens
tacgctgcctggacgaat

SEQ ID NO: 181 - DNA, 16 bp, Homo sapiens
aaggagcgcacttcgg

SEQ ID NO: 182 - DNA, 16 bp, Homo sapiens
gccggatcccggaagt

SEQ ID NO: 183 - DNA, 16 bp, Homo sapiens
gaagtgacgcgctcgt

SEQ ID NO: 184 - DNA, 16 bp, Homo sapiens
caggcaaggactcaac

SEQ ID NO: 185 - DNA, 16 bp, Homo sapiens
aggattccgtgcgccc

SEQ ID NO: 186 - DNA, 16 bp, Homo sapiens
cgccgccgtgctcagc

SEQ ID NO: 187 - DNA, 16 bp, Homo sapiens
acgagtggatgcttgg

SEQ ID NO: 188 - DNA, 17 bp, Homo sapiens
gaggcgaaattaaaatc

SEQ ID NO: 189 - DNA, 16 bp, Homo sapiens
cgaagagcgttttcat

SEQ ID NO: 190 - DNA, 16 bp, Homo sapiens
cactcgctctcgggca

SEQ ID NO: 191 - DNA, 16 bp, Homo sapiens
acaatcgatacactca

SEQ ID NO: 192 - DNA, 16 bp, Homo sapiens
aaaaaatcaattgaaa

SEQ ID NO: 193 - DNA, 16 bp, Homo sapiens
gtgccttcccggcgcc

SEQ ID NO: 194 - DNA, 20 bp, Homo sapiens
gggctgggcacgcccccagt

SEQ ID NO: 195 - DNA, 16 bp, Homo sapiens
gtggatgccacggggc

SEQ ID NO: 196 - DNA, 16 bp, Homo sapiens
ccctctgttaggccga

SEQ ID NO: 197 - DNA, 17 bp, Homo sapiens
cggacgactgcagcagt

SEQ ID NO: 198 - DNA, 16 bp, Homo sapiens
cagtgtctttgttagt

SEQ ID NO: 199 - DNA, 16 bp, Homo sapiens
tctaagtaaactccct

SEQ ID NO: 200 - DNA, 18 bp, Homo sapiens
ggtggtgttggttggtga

SEQ ID NO: 201 - DNA, 18 bp, Homo sapiens
acaaggacacatgcattg

SEQ ID NO: 202 - DNA, 18 bp, Homo sapiens
attcatggcgaggagcaa

SEQ ID NO: 203 - DNA, 16 bp, Homo sapiens
ttacggttcggtcatc

SEQ ID NO: 204 - DNA, 16 bp, Homo sapiens
gacgccgcggggccag

SEQ ID NO: 205 - DNA, 16 bp, Homo sapiens
aggcaccccgcgacac

SEQ ID NO: 206 - DNA, 17 bp, Homo sapiens
gttccccgacccacgtc

SEQ ID NO: 207 - DNA, 18 bp, Homo sapiens
ggcagccccgattattta

SEQ ID NO: 208 - DNA, 16 bp, Homo sapiens
cagagcacggggcggg

SEQ ID NO: 209 - DNA, 18 bp, Homo sapiens
ttgcccagcggaccccag

SEQ ID NO: 210 - DNA, 17 bp, Homo sapiens
caggttcggtccgccat

SEQ ID NO: 211 - DNA, 18 bp, Homo sapiens
tggtggcacgcagcctgg

SEQ ID NO: 212 - DNA, 16 bp, Homo sapiens
cctggcgcagatcggt

SEQ ID NO: 213 - DNA, 16 bp, Homo sapiens
agtgcccgccgcagcc

SEQ ID NO: 214 - DNA, 16 bp, Homo sapiens
gtgctcagcgcggacc

SEQ ID NO: 215 - DNA, 17 bp, Homo sapiens
ttcggccagccccgcat

SEQ ID NO: 216 - DNA, 18 bp, Homo sapiens
gacccgcctgggcaacgc

SEQ ID NO: 217 - DNA, 17 bp, Homo sapiens
gccgaacccagtcgcgc

SEQ ID NO: 218 - DNA, 16 bp, Homo sapiens
aacccgcgagcttaga

SEQ ID NO: 219 - DNA, 18 bp, Homo sapiens
catacacacgtgtgggta

SEQ ID NO: 220 - DNA, 16 bp, Homo sapiens
tatgtagtcgcgtagt

SEQ ID NO: 221 - DNA, 18 bp, Homo sapiens
agtgcatgcgcagaaggc

SEQ ID NO: 222 - DNA, 18 bp, Homo sapiens
cttagacacgaaatgtca

SEQ ID NO: 223 - DNA, 18 bp, Homo sapiens
aagtaagtcgttgctgcc

SEQ ID NO: 224 - DNA, 16 bp, Homo sapiens
ggactacaggcgtgtg

SEQ ID NO: 225 - DNA, 17 bp, Homo sapiens
gcagaggcgcgatctcg

SEQ ID NO: 226 - DNA, 16 bp, Homo sapiens
agggagtcttgctctg

SEQ ID NO: 227 - DNA, 16 bp, Homo sapiens
agcgccgaccaatcgc

SEQ ID NO: 228 - DNA, 16 bp, Homo sapiens
cccggccgggtccaaa

SEQ ID NO: 229 - DNA, 16 bp, Homo sapiens
caatcgtcagcggcgg

SEQ ID NO: 230 - DNA, 17 bp, Homo sapiens
ccaacgggtgggcacgt

SEQ ID NO: 231 - DNA, 17 bp, Homo sapiens
aggccgttggcacccgt

SEQ ID NO: 232 - DNA, 17 bp, Homo sapiens
ttcccgagccccaccga

SEQ ID NO: 233 - DNA, 16 bp, Homo sapiens
acagccgtggcctcgt

SEQ ID NO: 234 - DNA, 16 bp, Homo sapiens
tgacgggcgtctccga

SEQ ID NO: 235 - DNA, 16 bp, Homo sapiens
caatgagcgcgctgta

SEQ ID NO: 236 - DNA, 18 bp, Homo sapiens
ctggtccgggaaaggcaa

SEQ ID NO: 237 - DNA, 16 bp, Homo sapiens
tcccggtgaaccggat

SEQ ID NO: 238 - DNA, 16 bp, Homo sapiens
ctcgcaaagccgctgc

SEQ ID NO: 239 - DNA, 18 bp, Homo sapiens
gcccagccagcgggctcc

SEQ ID NO: 240 - DNA, 16 bp, Homo sapiens
gggcgcgcacggctac

SEQ ID NO: 241 - DNA, 16 bp, Homo sapiens
ctaccgcgcgtggagg

SEQ ID NO: 242 - DNA, 16 bp, Homo sapiens
ggtgcgcgcagagaac

SEQ ID NO: 243 - DNA, 16 bp, Homo sapiens
caagcgcaccgacgcc

SEQ ID NO: 244 - DNA, 16 bp, Homo sapiens
aaacaccgaacgggat

SEQ ID NO: 245 - DNA, 18 bp, Homo sapiens
ccagagcccgagcccaca

SEQ ID NO: 246 - DNA, 16 bp, Homo sapiens
tcaggcgcggacccgc

SEQ ID NO: 247 - DNA, 16 bp, Homo sapiens
ctcgcgaagccacggg

SEQ ID NO: 248 - DNA, 16 bp, Homo sapiens
catcggttcggagcca

SEQ ID NO: 249 - DNA, 16 bp, Homo sapiens
aagcagcgccgccact

SEQ ID NO: 250 - DNA, 16 bp, Homo sapiens
gccgctcggaactcgc

SEQ ID NO: 251 - DNA, 16 bp, Homo sapiens
tacgtggtcgagggcc

SEQ ID NO: 252 - DNA, 18 bp, Homo sapiens
ggaagccccgatggccta

SEQ ID NO: 253 - DNA, 17 bp, Homo sapiens
ggcgttggcaccgctga

SEQ ID NO: 254 - DNA, 16 bp, Homo sapiens
ccaagacgcgttttct

SEQ ID NO: 255 - DNA, 16 bp, Homo sapiens
ccctgtcgcgggaacc

SEQ ID NO: 256 - DNA, 16 bp, Homo sapiens
atacgtagactcggag

SEQ ID NO: 257 - DNA, 18 bp, Homo sapiens
gaagtggccgccagtccc

SEQ ID NO: 258 - DNA, 18 bp, Homo sapiens
aaggaatccgtcttgtaa

SEQ ID NO: 259 - DNA, 18 bp, Homo sapiens
aatgctttcgtgatgctg

SEQ ID NO: 260 - DNA, 16 bp, Homo sapiens
caaaacgagggagcgt

SEQ ID NO: 261 - DNA, 16 bp, Homo sapiens
aggagccggccccgca

SEQ ID NO: 262 - DNA, 16 bp, Homo sapiens
caaagcgcggacactt

SEQ ID NO: 263 - DNA, 16 bp, Homo sapiens
cctgagcgggcaccga

SEQ ID NO: 264 - DNA, 16 bp, Homo sapiens
cagagccgaggggcgg

SEQ ID NO: 265 - DNA, 16 bp, Homo sapiens
ccccgagggacggaag

SEQ ID NO: 266 - DNA, 16 bp, Homo sapiens
catgtccccggcgaat

SEQ ID NO: 267 - DNA, 16 bp, Homo sapiens
acagtcgaggagccgc

SEQ ID NO: 268 - DNA, 18 bp, Homo sapiens
acttgtcccgaccaatct

SEQ ID NO: 269 - DNA, 18 bp, Homo sapiens
aacctgcgaacgcttggg

SEQ ID NO: 270 - DNA, 16 bp, Homo sapiens
gccgatgctcccggca

SEQ ID NO: 271 - DNA, 17 bp, Homo sapiens
gagccccgctacatcgc

SEQ ID NO: 272 - DNA, 16 bp, Homo sapiens
ttcctgcggttcgaca

SEQ ID NO: 273 - DNA, 20 bp, Homo sapiens
tacgccaaggccaacgcaca

SEQ ID NO: 274 - DNA, 17 bp, Homo sapiens
tgctccgccgctacaac

SEQ ID NO: 275 - DNA, 16 bp, Homo sapiens
ggcgcaggtcacgacc

SEQ ID NO: 276 - DNA, 16 bp, Homo sapiens
atccgccacggaccgc

SEQ ID NO: 277 - DNA, 16 bp, Homo sapiens
agtctccggatccgaa

SEQ ID NO: 278 - DNA, 16 bp, Homo sapiens
taccccgaggcagcgg

SEQ ID NO: 279 - DNA, 18 bp, Homo sapiens
gagagaaacggcctctgt

SEQ ID NO: 280 - DNA, 16 bp, Homo sapiens
cccgacggacgcctcc

SEQ ID NO: 281 - DNA, 16 bp, Homo sapiens
gtacgacggcaaggat

SEQ ID NO: 282 - DNA, 18 bp, Homo sapiens
agttgctccgcagatact

SEQ ID NO: 283 - DNA, 16 bp, Homo sapiens
aagaggcgaaaagcag

SEQ ID NO: 284 - DNA, 17 bp, Homo sapiens
agcaagcggctgcatac

SEQ ID NO: 285 - DNA, 17 bp, Homo sapiens
aaattgagcgcctatgt

SEQ ID NO: 286 - DNA, 16 bp, Homo sapiens
gcagggctcagcagga

SEQ ID NO: 287 - DNA, 16 bp, Homo sapiens
accctcacactctggc

SEQ ID NO: 288 - DNA, 17 bp, Homo sapiens
tggagggacagggagga

SEQ ID NO: 289 - DNA, 16 bp, Homo sapiens
ctccgcgggcgttgag

SEQ ID NO: 290 - DNA, 17 bp, Homo sapiens
gacagtcagaggaagac

SEQ ID NO: 291 - DNA, 16 bp, Homo sapiens
caggggtgacgcgcct

SEQ ID NO: 292 - DNA, 17 bp, Homo sapiens
ctcctcgcgcacatgtt

SEQ ID NO: 293 - DNA, 16 bp, Homo sapiens
aagggcggcaagacgg

SEQ ID NO: 294 - DNA, 16 bp, Homo sapiens
ccaggccggacgcaag

SEQ ID NO: 295 - DNA, 18 bp, Homo sapiens
taggcgcctaattagcgt

SEQ ID NO: 296 - DNA, 16 bp, Homo sapiens
cgctttcacacaccca

SEQ ID NO: 297 - DNA, 20 bp, Homo sapiens
acctgggccccccacctcac

SEQ ID NO: 298 - DNA, 16 bp, Homo sapiens
cccataaaccctgcta

SEQ ID NO: 299 - DNA, 16 bp, Homo sapiens
cctcagacattaaaga

SEQ ID NO: 300 - DNA, 16 bp, Homo sapiens
aaaacgtggacgtttt

SEQ ID NO: 301 - DNA, 18 bp, Homo sapiens
acttggagcgaggaactc

SEQ ID NO: 302 - DNA, 18 bp, Homo sapiens
ctgaaagtcggccaaagc

SEQ ID NO: 303 - DNA, 18 bp, Homo sapiens
ggcagctacgagagagct

SEQ ID NO: 304 - DNA, 2280 bp, Artificial Sequence
  Description of Artificial Sequence: Synthetic polynucleotide
attagtatagaattgttattataggatcgtagtttaagtattagagtgatattaattggttatgtttaattgttttaaaattattttttaaataattatattgatattataatagaaattatgggtatttattttatatttagatggaaggtattattggatatgtattaaaaaaaagattttttgaaaaaaataaaataaaataaaatattattattaaaataaaagaatttaaaataatttttaaaaattttttttaataaaatatattgttaatttataaaatggattgatgattagttatgtaaatgttttaaataaaatttttatattttttttatagttaatttatgttttgaattgtttatcgattataaataatggcgaaatggtattttttgattatattgtattttgtttatagaaagtttgatacgatggaatttattaggtaagagggtgggtgttgtgaacgagatgtcgtttttagtcgcgggggcgggtagagtttttggagcgcgtggattttatgcgagttatgtagtattttttgttttttgttagaagttaaagttatttatttataatatatttatgttttcgtgtaattgtttatttttgcgtagttaatagggagttattacggggttaatttataggggaaaaatagatatttatttttttatatagatgtggatatatgtatatatgtatagaatcgcggtatttaattttataggtttcggggtcgagggcgagggtattgttagtttttttagtagggtcgtgttgggttttttgttaaaaggggtttttagtaaagagcgagttggttgcgtttttttagttttttatagtttgttttttgttttaaggagggagttaagtaaggggttaggttttttcggttgtgcgagtttatagttatttatttatttatgtttatttaggttgatggcgcggggatttgggtatacgtttttttagttttcggggtgtttgcggtggggaaggatgtatcgttttttttttgtttttttttattggggttggggttttagtttgagagcgagtgagagttatagttatatattttgtgggttttatttgcgttgtaaggtttattgtgttagtaggaagagttatagattgtttgtagggaattaatttcggacgcggaggagttggtatttcgttttttggatcgttttcggttttttaggataaatacgagtatgtttattacggtgaaggcggaggtgataaatattagtagtagtttcgggattaatatcgagatggatattttgttggtgtttaggtaggagttggagtgcgtttcggttttcgttaatttagtgttgtttttattgtgcgaagttaacgtgggcgagattttagcgtatagttgagggtagatttcgttattggagaggagtatgaaattttttttaaagaagtttatcggcgttttatatttgaggtcgtttattagtatttcggaatttaagcgttttgtttattgtttgaaaggtataattgtgtaggagtatttttaggggttttcgtggaggtttatttggatgatggaggttaattggtttagtatttttgttatcgggaggtatatgaagtaattgttgtgtaggttgagtttagagagcgagattttagcgaatacgtttataggtagggattttagtaggttgttgttgagaatgaggatttttagtttgggtatggtattgaaagtgttcgggaggatgagttggatagcgttgtattttacgtttaggtattttaggttttgtagtttcgcgaatttttttcgggatagcgtgtttaggtaattgttatttatgtatagttatttgaggtttaaaaggtttttgaaagtgttgttttttatagtagcgatgttattgttgtttagatttaatagaatgaggtttttgtaatttataaagtgcgattttcggatgttgtggattttgttatttcgtaggaaaagtttttgtacgttagagagtttgggttttaaattagttaagttgtttacgtttttgttgttgtagtttatttttaaattcgattttgggatgtggtcgtagttgtagtttttagggtagggtaaattgttagttaagggtttgtttttggagttattcgtcgttatcgttgttgtgggtttgattttgatttgttagttgtttgggatttttgtattttcgtttggagtagattttggtgtggtatgatttttttgtttatttgttttga

SEQ ID NO: 305 - DNA, 2280 bp, Artificial Sequence
  Description of Artificial Sequence: Synthetic polynucleotide
ttaagataaatgggtaagaggattatgttatattagggtttgttttaaacggaggtataaagattttaggtaattggtagattaaaattagatttatagtagcgatagcgacgggtagttttaggaataaatttttagttaatagtttattttgttttgggggttgtagttgcgattatattttagggtcgggtttaaagatgaattgtaataataggaacgtgagtagtttggttgatttgaagtttaagttttttaacgtgtaggagttttttttacgagataataagatttatagtattcgaaaatcgtattttgtggattataagaattttattttgttggatttgggtaataataatatcgttattgtagagaataatatttttaagaattttttggattttaggtggttatatatggatagtaattatttggatacgttgtttcgggagaaattcgcggggttgtaaaatttagagtatttgaacgtggagtataacgttatttagtttattttttcgggtatttttaatgttatgtttaaattgaggatttttatttttaataataatttgttgaggtttttgtttgtggacgtgttcgttggggtttcgttttttaaatttagtttgtataataattattttatgtatttttcggtggtaggggtgttggattagttaatttttattatttagatagatttttacggaaatttttgggagtgtttttgtataattgtgttttttaagtagtgggtagaacgtttgggtttcgaagtgttgatgagcgattttaagtgtgagacgtcggtgaatttttttagaaaggattttatgtttttttttaatgacgagatttgtttttagttgtacgttaggatttcgtttacgttaatttcgtatagtaaaaatagtattgggttggcggagatcgggacgtattttaatttttatttagatattagtagggtgtttatttcggtgttggtttcgggattgttgttggtgtttgttattttcgtttttatcgtggtgggtatgttcgtgtttattttgaggaatcgaaagcggtttaagagacgagatgttaattttttcgcgttcgagattaattttttatagatagtttgtgattttttttattggtataatgggttttataacgtagatggggtttatagagtgtatgattgtggtttttattcgtttttagattaagattttaattttaataggggagggtagagggaaggcgatatatttttttttatcgtaggtatttcgggggttggaggggcgtgtatttaaattttcgcgttattagtttggatgggtataagtagataaataattgtgagttcgtataatcgaaagggtttgattttttatttagttttttttttgaaataaagagtagattgtggagagttgggagagcgtagttagttcgttttttgttgagagttttttttgatagaaagtttagtacgattttgttggaagaattgatagtgttttcgttttcggtttcggggtttgtggggttggatgtcgcggttttatatatatatatatatatttatatttatatagagagatagatatttattttttttttgtggattagtttcgtgatggttttttgttggttacgtagggatgggtagttgtacgaaggtatgaatgtattgtaaataagtaattttgatttttgataaaaaataaaaagtgttgtatggttcgtatggaatttacgcgttttagggattttgttcgttttcgcgattggagacggtatttcgtttatagtatttatttttttatttgataagttttatcgtattaaattttttataaataaaatatagtataattagaaagtgttatttcgttattatttgtgatcggtaggtagtttagagtataagttaattgtgaaaaaaatgtaaaggttttatttaggatatttgtatggttagttattagtttattttatgagttaataatgtattttgttgagggaagtttttaggggttgttttgggtttttttattttgatggtgatgttttattttattttattttttttagggggttttttttttaatatatatttaataatgttttttatttgaatgtaaaataagtatttatgatttttattatagtattagtgtaattatttaaaaaatgattttgaggtagttaagtatgattaattaatgttattttagtgtttaggttgcgattttatggtagtaattttgtgttggt

SEQ ID NO: 306 - DNA, 2477 bp, Artificial Sequence
  Description of Artificial Sequence: Synthetic polynucleotide
tggtatagatatggtttttaaagttaaaaattatgatggagtgaaggatagttgtgtttagatttgcgttttgttttttggaggttgttgtggttttggggatgagtcggaggtgggtaggtagcggttttcggggtttgtagtagggaggttattatttgtatagtagaatatagtattattttatagggagtatttcggggcgggtagtaattttggaggtattttcgggaaggagttaggtatgggggaggcggaggcgattttagaagtagaggagtcgttggggagttacggttttttgggtgtggagttgtggaggatgagtgttatttttttttttcgggttttttattttgtagggatttttacgtttaggattatttgattgttaaggtttcggtattttcgttaggttagttgggggttaaggtttttaatttcgaggattggggtcgttaatatgggtagtagtataggaggtcgagaggaggtttataagggttgtattttttttttggttgtagtttattttttagagtagggcgggcgtggagttatttttattagtattgttggttttgagggtttggtgggtagtgtcgtttggtgtgggggatagtttttgagtaggttgtcgtatttttggtattttggtttttttgggatttttaggtggtttacgttcggtagtgttcgttttttgggtttttagggttcgtttttgttgtagtttttgtagtgggagtatcgttgagtattgtttttgggagaggacgattttaggttttatagttaagttgttttgaggttaagtgtttcggggtttagggagttttagtagtagtttcgtacggttaggtttgggttacggtgttgtttagtggtttttgcgcggttagtatttgaatggttgttcgtttggtttggcgtgtttttttttttcgggttttttttttggttgtttttttttgttggtgtaggtttaagagggttttttcgtttgatcgttgtcgttgtttttgttaaagaagtcggtgttatgtggcgtttatatttggaagacggaatttagatttagattagaggtttttttataacgttttggagttttttagagttcgtggaattttagggttagtagggaaagtgaaattttattaggattttgaatttgttatttttttgttttatagaggatgagttttacgtcgtaggtggttaatagttttggcgtgggggagatagttttgtttttatagaacgtttttttgagattttttagtttgggatggatttagtaggcgttttttgatatttaggttttgaggatcgttagtgaggattattttgattgttcgcggggatttagggttaagaaggatgttgtatttagagacggggtttacgagtaattttaggttttgattttatttgttttagaaatttaaatttttgggattttgggttagatttttcgggggagtatggagtgattgagacgtttatattgatttttcgtttggtttgaagtaagtgttttaggcgggtagtttttgtttcgcgtcgttgtatttggtgtcggtattagcgttggatggtgatagtggtttggtttatttggtggataaatttgttcggagagtaggatttagggttaagataggattagcgtttcggtaggatttagttggttgttggtggaaggtcgagtcggggaagagagaagtcggcggttgtatttaagtagttttttttataaggtaggattagtttatttggattatttttatatggtaggattagtcgtttggattagttttattaaaatttaaaattttttttttgggaaggtgtttaggggagaggaaacgtttatttacgtaggtttgtgtggttttatttataattgttaggaagtgggaagagtttaaatgtttatgatttggttatagcgtgaatattggatggcgggattttatttataggtaataggttcgggatttaggttagtgtagattataggtcgtggttttatagagagggtggtcggaataggtagggttatgagggaatagattggtggttgttggtatttgggcggggaaggagttcgagggaagtttggtggtgttgggtcgtttttttattttggtttgttgtgtttatagatagtattatatattttggtggaattttatggaattgtatatttataatgggtattttttattgtatataaattatattaagtaaaattgattaagtaaaaaaaaaaatgttttattttggttttcgggattatgtgtggatttttttagtaaaggtattaatagagaatttagaacgtgtgagttttagttcgggagtagtttgtttcgggtagaattggggggttttaaggggttgcgggtttttggttttttttttttcgtgttatttatcgcgtttataggtttggtttttttagttttaat

SEQ ID NO: 307 - DNA, 2477 bp, Artificial Sequence
  Description of Artificial Sequence: Synthetic polynucleotide
gttagggttagggagattaggtttgtagacgcggtgggtggtacgagggaagggggattagaagttcgtaattttttgaagttttttagttttgttcggggtagattgttttcgagttagggtttatacgttttgggttttttgttagtgtttttgttgagagaatttatatatggtttcgagagttaaggtgaagtatttttttttttgtttaattagttttatttagtataatttgtatataatagaaggtgtttattgtaagtgtgtagttttatgagattttattagggtgtatagtgttgtttgtggatatagtagattaagataaggaaacggtttagtattattaggtttttttcgagtttttttttcgtttagatgttagtagttattagtttgtttttttatagttttgtttgtttcgattattttttttgtggagttacggtttgtggtttgtattggtttgagtttcgggtttgttgtttgtgggtagggtttcgttatttagtatttacgttgtagttaggttatgggtatttgaattttttttattttttggtaattgtaaataaggttatataggtttgcgtgggtaggcgtttttttttttttgggtatttttttaggaagaaggttttgggttttagtggagttggtttaggcggttggttttgttatgtgaaaatggtttaggtgggttggttttgttttgtgaaaagggttatttgagtgtagtcgtcggtttttttttttttcggttcgattttttattagtagttagttgggttttgtcggggcgttggttttgttttggttttgagttttgtttttcgggtaggtttatttattaggtgaattaggttattgttattatttagcgttggtatcggtattaggtgtagcggcgcggagtaggagttgttcgtttggagtatttgttttaggttaagcgggaggttagtgtgggcgttttagttattttatgttttttcggggggtttggtttagaattttaggggtttgagtttttgggataggtggaattaaagtttaggattgttcgtgggtttcgtttttgggtgtagtattttttttgattttgggttttcgcggatagttagggtggtttttattggcggtttttagggtttgggtgttaggaaacgtttgttgggtttattttaggttggagagttttaggaggacgttttgtgggggtagagttgttttttttacgttagaattgttggttatttgcgacgtagggtttattttttgtagagtagagaaatggtaggtttaaggttttggtggggttttattttttttgttggttttgagattttacgaattttaggggattttagggcgttgtggggaaatttttggtttgggtttggatttcgttttttagatgtaaacgttatatggtatcggtttttttggtaggagtagcggtagcggttaggcgaggggatttttttggatttgtattagtagaaagaggtagttaggaggaaggttcgggaggagaaggtacgttaagttaggcgagtagttatttaggtgttgatcgcgtagggattattgagtagtatcgtggtttaggtttgatcgtgcggggttgttgttggggttttttgggtttcgggatatttagttttagggtagtttggttgtggagtttggggtcgtttttttttagggatagtgtttagcgatgtttttattgtaggagttgtaatagaaacgagttttgagagtttagaaggcgagtattgtcgagcgtgggttatttgagaattttagggagattagagtgttaggaatgcggtagtttgtttaggagttgttttttatattaggcggtattgtttattaggtttttaaggttaataatattggtgagagtggttttacgttcgttttgttttggggggtggattgtagttaggaaggaagtgtagtttttgtggattttttttcggttttttgtgttgttgtttatgttggcggttttagttttcggagttaggggttttggtttttagttgatttgacgagggtgtcgagattttgataattaaatggttttggacgtagggatttttatagagtagaaggttcggaagggaggggtggtatttattttttatagttttatatttagaaggtcgtggttttttagcggtttttttgtttttggggtcgttttcgttttttttatgtttggttttttttcgggggtgtttttagagttgttgttcgtttcgggatgttttttgtggaatggtgttgtgttttgttgtgtaggtggtggtttttttgttgtaggtttcggagatcgttgtttgtttattttcgatttatttttagaattatagtagtttttagaggataggacgtaggtttgagtatagttgttttttattttattatggtttttggttttaagggttatgtttgtgtta

SEQ ID NO: 308 - DNA, 3685 bp, Artificial Sequence
  Description of Artificial Sequence: Synthetic polynucleotide
taagttttttttttcggcgtataggtacgtagttataggttaagttgcgacgcgagtttcgcgcgcgggattttcgtaaaaggttcgttcgatgcgttgggcgggaatcgagttcgggttaattgtttggaaggtaattatgtttattattatattattaacgtcgtacggcgcgggtagtttcgtcgcgtcggttcggggtttttattagcgcgtcgtcgacgttcggggtaggtcggtttcgacgttcggttcgttcgttcgttcgtagtttcgcgttgtcgcggtttttttaaaggtcgtttcgcgttttatcggtgtaaggttagcgcggttgattcgttacgttcgtttgtttttgggggcgttttcgtttattcgtcgtttcgggtttttagagtttttttttaataggtgttcgggggggaaacggtcggcgtcggtagggtttttatttttacgttttttatcgggcgtagggtttcgtgtgtcgtagaaagtttttttcgataattattttgagtcggtagttcgttgggcgtcgtgtagggttagaggaggtttttcggttgtcgttattaagtcgcggacgagaagaaaagataggaggttaaggaggtttagaaggttaaagggttaggtaggttaggttcgagatggtattttgcgattagttggagggcggaggaaggagaaggagggtttataggttgggttcgaggcggcggtttaaaaagtacggttgttttttcgtcggggaatcgaatttcggtttttcgcgtgataggcggggatatttattattatattaacgaggacgacggcgacggtcgtcgggacgttagattttatttcgatcgcggacgtttagttttgttttgattttttttttcgacggtaggggtcgggcgcgtgttcgttttttattcgtcgttcgtcgttcgttattcgttatacgttattcgttatttgttattcgtttttcgttatcgttggtacgatttatttcgatatttaataaagtattttgcgatttcgttgggattcggagtcggagtcggatttcgataggtatcggagcggcgtggaattttttcgcgcgttttgtttgttgtttttaacgcggggatcgcgtcggggtaggaggaggcgcgggcgaaatagttaggtcgttgtttttaggacgcggtgggcgtacgttttgcggggttcggcgagcggaggcgcgggggttggggcgtgcgtcggcggcggtcggttcgacgcggattttttgggttcggggtggggacgcgggggcgtttacgttaacgttagtcggtttcgtttatttggcgttcgtttttttcgcgcggttcgtcggttgcgtatcgaatttagataggcgtcggttaagggcgtaggcgttcgcgtcgggttttagttatgttagcggcgaagcgtttcggcgcgtcgttaggatggtcgagcggtttaaggcgttgcgtttaggtcgtagttttttttggaggcgtgggttcgaattttatttttgataagtcgattttttggttcgttcgtcggagggtaacgtttatggtaattttggagtatttttggtcgttttttgttttgagtttttgttcgttttttagattttagtttttttgaagtaagtttttaaaacgtcgtcgttttttaggtacgttcgttttttttgtttattcgtcggttgtcgtagaaatagtttaggattatgcgttagcgttcgcgattttttattaattgtttttcggatagacgttttttttattattttatacgtttttttttttggttttatatatagcgagcgatcgcgattattttttacgtttttttttgtttatttttttcgttcgttttttttttattcgtttaaatagatatagtttagattttttttttatttttttttttttttttttttttttatcggttttcgtttatcgtttatcgttttgaatcgtcgttgcgttgtttagaggcgttttggtttgaatagttcgttcggttttattttttaatttttgatcgttgagtagtagcgagcgattcgttcgtggagtcgtatatacgttttttattagaggtacgttatttaatattttgttttttttttcgatttttcggatttcggtcgcgtattttattttgtcgatattttagttaggtcgtcgattttatttcgttatttgtgtttttttttcgttaatatttgtttgtcggtttatttgtagttcggacgtttgtcggttagaggtagcgggaattttgtatatagtcgggtaggcgagtttaaattcggaaagatagtttaagaggaattacgagcggaagttttagattttcgttattcgtttataaacgtttggtttcgtcgggattagttttgcgttatagcgtatttttacgcgggaagtcgcggtttgggtcgttttagttatatttagcgcgttttttttagggttagttagttgcggttttgtcgaagcgttttttcgtttttttttcgcgttttagtttttttattagtttagggggtcggattttaagtgcgagtcggtggcgtgggttagagcgtaggagcgaggcgtttacggatttggtttgcgtttttgagtcgtacgttacggttgcgagattcgttttttatcgtcgttttcgttcgttgatatatttatttcgttttttatttgttggtgatataagtgagaaggttggttttacggtggtgaaaaaaaaaaatattatacgaaagaaagaaagaaagaaagaaagaaagaaagaaagaaagaaagaaagaaagaaagatagaaagaaataataaaaataaaatataaaaattttgggtttgtgtcggggattcgcgtttagtaaggttcgttatagtaaatttgtttatacgggtattcgggcgcgggttacggtcggttttttttttggagatttcggcgggtagtttttcgattttgggcggtagagaaagcgtaagatgggacgagtcggttttttttttttcgtttttttttcgcgtttcgttttaggtttttcgacgtgacgagagtttttttttttgttcgttttatcgggttagtttttcgtggacgttgtaataggacggaggtttacggtaggcggtgattagtgaacggcggttggtggcgagtttcgttgtgttagttttcgttggcgtttgttatcggtgtatgggtggtttagtggtagaattttcgtttgttacgcgggaggttcgggttcgattttcggtttatgtagtacgtttttttattttggtgttgtagtagtattaaggcgtagttgcgttcgtttttgtcgtttttttatattcggggcgcgcgagcgagttcggtatcggttgcgtttttacgcgcgacggttttttgttttttttttcgtgtttttttcgattgatttagggatgagtttatttttcgtatttatatattttggtgataataatttttttagatacgagagcgcgttagatattagaatttggtagttttttggttttgtttttttttattgttttgttatcgtttttgttcgacgtattttattttacggaatatcgttaggtattacgggtttgtagttattcgtattattttttttttttatattttatcgtttcgtttttttt

SEQ ID NO: 309 - DNA, 3685 bp, Artificial Sequence
  Description of Artificial Sequence: Synthetic polynucleotide
gagagaggcgaggcggtgaaatgtgaagagaaggggtggtgcgagtggttgtaagttcgtggtgtttggcggtgtttcgtgaagtgaaatgcgtcgggtagaggcggtggtagggtaatgaagagaaataggattaggaggttgttaagttttggtgtttggcgcgttttcgtgtttggaggggttgttgttattaaggtgtgtgggtgcggggggtaggtttatttttaagttagtcgagagaggtacggaagaaagggtagagggtcgtcgcgcgtgggagcgtagtcggtgtcggattcgttcgcgcgtttcgagtgtaaggaggcggtagaggcgagcgtagttacgttttggtgttgttgtagtattaaaatgggagggcgtgttgtatgggtcgggaatcgaattcgggtttttcgcgtggtaggcgagaattttattattgaattatttatgtatcgatggtaaacgttaacggaagttggtatagcggaattcgttattagtcgtcgtttattggttatcgtttgtcgtgggttttcgttttattgtagcgtttacgagaggttggttcgatggggcgagtagaaggggaggttttcgttacgtcgagggatttgaggcggggcgcggagggagagcggagggagagaggtcgattcgttttattttgcgttttttttgtcgtttagggtcgagagattgttcgtcggggtttttaggggaaggatcggtcgtggttcgcgttcgaatgttcgtgtgggtagatttgttgtggcgggttttgttgagcgcggattttcggtatagatttagagtttttgtgttttgtttttgttgtttttttttgtttttttttttttttttttttttttttttttttttttttttttttttttttttttttcgtgtggtgttttttttttttattatcgtggggttagtttttttatttgtgttattagtaggtgagaggcgggatgggtgtgttagcgagcgggggcggcgatggggaacgggtttcgtagtcgtggcgtgcggtttagaaacgtagattaggttcgtgggcgtttcgtttttgcgttttgatttacgttatcggttcgtatttggggttcggttttttgggttggtagggaggttggagcgcgagaaaggagcggaggagcgtttcggtagagtcgtagttggttgattttggagaaggcgcgttgggtgtggttgggacggtttaggtcgcggtttttcgcgtggggatgcgttgtggcgtagagttggtttcggcggggttaggcgtttgtgggcgggtgacggggatttagggttttcgttcgtgattttttttgggttgttttttcgggtttggattcgtttgttcggttgtgtgtagggttttcgttgtttttggtcggtaggcgttcgggttgtaggtgggtcggtaggtaggtgttagcgggaagggagtataggtagcgaggtgggatcggcgatttggttagggtgtcggtagaatggaatgcgcggtcggggttcgaggggtcggaggaaaggataggatgttggatggcgtgtttttggtgggagacgtgtgtgcggttttacgagcgagtcgttcgttgttgtttagcggttagaagttggagggtgaaatcgggcgggttgtttaggttaggacgtttttgggtagcgtagcggcgatttaaggcggtgggcggtgggcggaggtcggtgggaggaaggagggaaaaggaggaataggggaagaatttgggttgtgtttgtttgggcgagtgaggagaaggcgggcggaggagataggtagggaagagcgtggaaggtggtcgcggtcgttcgttgtgtgtggggttagggaagagggcgtgtgaggtggtggggagggcgtttgttcgaagggtaattggtagagggtcgcgggcgttggcgtatggttttgggttgtttttgcgatagtcggcgggtgggtaggaagaacggacgtgtttgagaagcggcggcgttttggaggtttgttttaagggggttggagtttggagagcgggtaagggtttaaggtaggaagcggttaaaggtgttttagggttgttatgggcgttgtttttcggcgggcgggttaaaaggtcggtttgttaggagtgggattcgaatttacgtttttaggggagattgcgatttgaacgtagcgttttagatcgttcggttattttgacggcgcgtcggggcgtttcgtcgttggtatggttgggattcggcgcgaacgtttgcgtttttggtcggcgtttgtttgggttcggtgcgtaatcgacggatcgcgcggggggagcgggcgttaagtgaacggagtcggttggcgttggcgtggacgttttcgcgtttttatttcggatttaaagggttcgcgtcgggtcggtcgtcgtcggcgtacgttttagttttcgcgttttcgttcgtcgaatttcgtagggcgtgcgtttatcgcgttttaggagtagcggtttgattgtttcgttcgcgtttttttttgtttcggcgcgattttcgcgttggagatagtaggtagggcgcgcggggaggttttacgtcgtttcggtatttgtcggggttcggtttcggtttcgggttttagcgggatcgtagggtgttttgttgggtgtcggggtaggtcgtgttaacggtggcggggggcgggtggtaggtgacgggtggcgtgtggcgggtggcgggcggcgggcggcgggtggaaggcgagtacgcgttcggtttttgtcgtcgggggaggggattaaggtagggttaggcgttcgcggtcggagtggggtttggcgtttcggcgatcgtcgtcgtcgttttcgttagtatagtggtgagtattttcgtttgttacgcgggagatcggggttcgatttttcgacggggaggtagtcgtgttttttgggtcgtcgtttcggatttagtttgtgggttttttttttttttttttcgttttttagttagtcgtagggtgttatttcgggtttggtttgtttggttttttggttttttgggtttttttggttttttgtttttttttttcgttcgcggtttggtagcggtagtcgggaggttttttttggttttgtacggcgtttaacgagttgtcggtttaaagtggttgtcggaagaggttttttgcgatatacggggttttgcgttcggtgggaagcgtaggagtggggattttgtcggcgtcggtcgtttttttttcgggtatttgttggggaagggttttgggggttcgaggcggcgagtgagcgagagcgtttttagaggtaggcgggcgtaacgggttagtcgcgttggttttgtatcggtggggcgcggggcggtttttggagaggtcgcggtagcgcggagttgcgggcgggcggacggatcgggcgtcggggtcggtttgtttcgggcgtcggcggcgcgttggtgggagtttcgggtcggcgcggcggggttgttcgcgtcgtgcggcgttggtggtatagtggtgagtatagttgttttttaagtagttgattcgggttcgattttcgtttaacgtatcgggcggattttttgcggagatttcgcgcgcggagttcgcgtcgtagtttggtttgtggttgcgtgtttgtgcgtcggggaaggaggtttg

SEQ ID NO: 310 - DNA, 2407 bp, Artificial Sequence
  Description of Artificial Sequence: Synthetic polynucleotide
taaggtttgggtatttttaggtagtagggataaggtgggttttttttttggttgttaaatttacgttaaagtcgagtttagggattggagtttaagaaatttatcgtttattttttagttcgatcggggatttgtatgtatttttgtcgtgttgttttgagttttttaattttttatattttttttttgttatgtatacgtttttatttaggtttgtaaaagttttagttttttttaggggtagggattcgtacgtcggtttagggtttggtacgcggggatgttgaaatagggttaggtttggtttttagtcgatcgttagagttttaaggtttagtaattttttttataaaggtttcgttaagaggcgaggaaataagagtcgggagaggggcgcggaacggcgggcgggacgaacgattagtttcgcgttttcggttagttgcgtcgagttaggggtatcgcggttgttgtgcggttggaaatttaggaatgggaaggttcggggtttgttcggtttcggaggtagttggcgggtcgtttttggcggcgttggagcggttagtggtagtcgggtacgggcgatcgggtcgttcgggtcgtttttagatcgtgattttcgaaaaattttgcgggcggggcgcgttcgcgtcgttttttgtcggaaggtgcgagttagtgcgttcgattgtgggcgggggcggaaagaggcgcgttttaaagtggtaatagatggtttttttatttaataggattaaaaaatttgtttttattcggtcgatcgcggaagtagagtaggcgggcggttaatggggatatgatggggggcggagtcgaggttttcgaagcggaagtgggttgttgttgaggcggcggtatttttttcgaggagtttttttgggcggttgaagaaggagtttttttttcggagtgcgtcggcggtggcgtttgcggatttaattagttttaggttaggtcgagttttgcgggaaagtagcggtaagttagggttttgtagatgcgaggtttaggtagtttcgcggtttatagaggtttcggttcgcgttttttgggggagtcgcgttgcgcggtttgatttagtcgaggttttgtagttcgggatttcgagttagttttggtcgttcgtattgtcgttcgcgcgggcgtatcgagttcggtttggcgcgggtaatagaagttaggaggtttgcgtttgggtttcggtttattttggggggtcgcggttatggggtttagtttttagtttaggaagggaaattgagattttgggaggggtaggaacgtttttaaggttatttggaaagtcgggtaggatgtgttgttagggggaagattcgggtagggtttttgtttttcgttgacgacgttttttttgtgtgttcgcgtcgtcgtttcgttatcgtggggtttgcgagtttgtcggggtgcgtgggtcgcgtggcggggttttttgtaggtcgggaggatttgagtacgggtgcgggtttgatcgtgggggcgtcgaggtcgtagtttaaaatttagtagggtttcgattttcgggcgcgttttcgggtttcggttggtggttggtggaacgtgcgattgtgaggtttgcggtttagttttgtatcgttcgggttttttatcgttttggcgcgtttatagataggtgtatgaagatttttacgattcgaaatagagttgttagtaaatatcgttttttcgtttttgatttatcggggaagagggaaaaggatagagtttgggtaagtcgttttggtagggattttagtttttgttttttatttgttagtttttatagacgtttataaatttaataattttcgttttgtttttgtattaagtttttgagttagacgtagggttttagttttggagtttggtttagattgtttaattgattggggagattgaggtttagaaaagtgaagtggtttgtttaaggttatatagttagttatttggtagtagatgaggttaagttttatttgtaagatttgggttttgaatttattgattaggagttttgggattattgttaataaaagagatattgaagggaattttttgttatttttttggtgatttgttttttaatggataaggatatattgggtttagttttatttgtgagtttgaggtgaaatagaggtattcgagtagtaagatatattgttggtttttgtattgtttgaatttgagtttttaaaaattttattttaatatatcgtttattgatttttttttgaattattatttttgtaaggattttttgtaaatattgtttttttaatttttatgaaattttaatgttatacgtaaattatttttttttatataatgtatgtatatttgtgttttgtatataaaatgagtaagattt

SEQ ID NO: 311 - DNA, 2407 bp, Artificial Sequence
  Description of Artificial Sequence: Synthetic polynucleotide
aaattttatttattttatgtataaagtatagatgtgtatatattatataaaaagaaatagtttacgtatggtattaagattttatgaagattagaaaaataatgtttataaaaggtttttataaaggtagtaatttaagaaaagattaataaacgatgtgttaaagtaagatttttggaagtttaaatttaggtaatataaaagttagtaatatattttgttattcgaatgtttttattttattttaaatttatagataaaattgaatttaatatgtttttgtttattaaaaagtaaattattaagaaagtaataaaagattttttttaatgttttttttattgatagtggttttaaaatttttggttaatgaatttaaaatttaaattttgtaggtaggatttaattttatttgttgttaaatagttggttatgtgattttgggtagattattttatttttttggattttagtttttttagttagttggatagtttaagttaggttttagagttgagattttacgtttggtttaagaatttggtgtagaaatagaacgaagattattaagtttgtgaacgtttatgggaattgataagtgaaagataaaagttgaaatttttattaaaacggtttgtttaagttttatttttttttttttttttcgatggattaaaggcggaaaagcggtgtttattagtaattttgtttcgggtcgtgagaatttttatatatttgtttataggcgcgttagagcggtgaagggttcgagcggtgtagggttgggtcgtaagttttatagtcgtacgttttattaattattagtcggggttcggaagcgcgttcggaaatcgaggttttattaagttttagattgcgatttcggcgtttttacggttaggttcgtattcgtatttagattttttcgatttataaaaggtttcgttacgcggtttacgtatttcggtaaattcgtaggttttacgatggcggggcggcggcgcgaatatataaaggaggcgtcgttagcggggaataaaaattttgttcgggttttttttttaatagtatattttgttcgattttttaagtgattttgggggcgtttttgttttttttagagttttagtttttttttttaggttaggaattaagttttatggtcgcggttttttagggtgagtcgagatttagacgtagattttttaatttttgttgttcgcgttaagtcgggttcggtgcgttcgcgcggacggtagtgcgagcgattagagttggttcgaggtttcgggttgtaaagtttcggttgggttaagtcgcgtagcgcggtttttttaagaggcgcgggtcgaggtttttgtaggtcgcgaagttgtttaaatttcgtatttgtaaggttttgatttatcgttgttttttcgtaaagttcggtttaatttggagttagttaggttcgtaggcgttatcgtcggcgtatttcggagaagaagttttttttttagtcgtttaggagagtttttcgagaaagatgtcgtcgttttaatagtaatttattttcgtttcggaggtttcggtttcgttttttattatgtttttattggtcgttcgtttattttattttcgcggtcggtcgggtaaggataaattttttaattttattggataagaaaattatttgttattattttaaaacgcgttttttttcgttttcgtttataatcgagcgtattaattcgtatttttcggtaagagacggcgcgggcgcgtttcgttcgtaaggtttttcgggagttacggtttgagggcgattcgggcgattcggtcgttcgtgttcggttgttattgatcgttttaacgtcgttagggacgattcgttagttgttttcggagtcgagtaggtttcgaatttttttatttttagatttttagtcgtataatagtcgcggtgtttttggttcgacgtagttggtcggaggcgcggagttggtcgttcgtttcgttcgtcgtttcgcgtttttttttcggtttttgttttttcgttttttaacgaggtttttgtgaggaaggttgttgggttttgggattttgacgatcggttggaaattaggtttggttttgttttagtattttcgcgtgttaagttttgggtcggcgtgcgggtttttgtttttggaggaagttgggatttttgtaggtttgggtggagacgtgtatataatagaggaagagtgtggaggattggaggatttagggtagtacggtagaggtgtatgtaggttttcggtcggattggagaatgggcggtgggttttttgagttttagtttttgagttcgattttgacgtgggtttagtaattaggaaaaaagtttattttgtttttgttgtttgagaatatttagatttta

SEQ ID NO: 312 - DNA, 2229 bp, Artificial Sequence
  Description of Artificial Sequence: Synthetic polynucleotide
ttttttttcggcgttggttggtgcgggttggggttaggtggagaagtcgttttttgttaaggtgatagaacgtgttgggggtgggggtcggggttagggtcggtgtaattagggggtcgttgtttttttttggatatagtggaagtttttttcgtattattaaatttttgttattttttttgagggatttgtttttaggtagtacgtaagttgttgtttcgggtttatttcgtatttttttattgggtgaggaaggagtattttgaatggagatgggggtgttttcggtttatatatttgtagagaagaggtgtgtcgggttgtatttttggaggtcgcggtaattgatattagagaagatttcggttgtagttgggaaggtttattggttggaaagaggtgttttttttttttagtaaagggttttgtttggaagggttgttttttatttgtttagtggtattataggacggtcggtttttattcgaattttttcggacggtattattatatagtcgggttttcgtagtgttggttttttaattcgatgattgttatttcggtgaggatttgtgttgatggtcggagaattttgcgttgcgggcgtatatggttaggtggcgtttggtaggcgacgttcgggtgtaggacggcgtttttatcgttttattttaaatcgttgtttgggtttaggtttttcggttttttgaataggggtttggggggttaaggacgttgaggtttcgggggtaggaagttttttttggttaagcgttttttttttttttcggtatatatttttttatttatttatttcgtttattttcggggcgagaggtttattaaggtagggcgcgttttttttatgaattattttaaggtttttgagtcgcgggggtttcgggtaattatttttttttttttttggttttaggtattttagtttaggggtttgtagagaagttcgaagttcggataaacgcgtcggacgttaataattttttatttttggtagtagtaaaggttaatatatttttattttttattttagtttgttattaaaataaagttgcgcgcggttgagggtaggaaggcgttgagatcgagaagaagggacgtttcggagaaagtgcgtttagttgattttagaaattagagtttttcgggatttcgtcgagattttttgtagggcgttttaatttgtttttttattgcgtgtcggcgtcgtagcgcgtgcggtttagggtttggtgatttcggtttagttcggcggtcgcggcgaggtttttggcgtagtcgtttggaatttcgtattagaatcgggatcgcgtaaatgttttggttgaagtgttattttatttaagaaatattgttgttaggaataaaatggggttttcggtgtttcgaagtattttttgaaatttttttaaaataatttataaaaaatgtttttgttttaacgttttataacgtttaaggaaatatgtaaatggtttgtttttttatcgagatggtcgttttaattaatagtgtatatatatataataatttttttaatttttttttttagagttaagtattttattatatgtaaattataataaagaaaagattgtgtaagattatgtaagtcgattgatttaaaatattgagttttaatttaggttttttgtttttttatttaataatttttgtgtttggattagattggtgaagtaggttatggaaattaataaagtaaaaaattaaaagtattttttttcgttatttttttttttaaaattaaataatagtcgtttttttttgagtaggttttagttttaggttcgagtttttttgcgattattttatagttatttatagtagttgttgttgtttttgtcgggttttcgtttttgttttttttgggtcgttttttgtatataaaatatattttagttttttaattaaatttaaatacgatttcggtagaatttatatatttcgtggtgtatggattgtgtcggtgtaggggaaataaatattttttggtatttaattattgagtttaattcgaaaaatcgggattgggtttttaggcggtattttaggggttttaatttggttcgcgtttttttagattttggcgttgagagcgttgtttttgcgggtgggtggacggagaggtaataatttgtttttaataaaaatttgtcgttatcgaatcgaaagcgaaagggaagggagaag

SEQ ID NO: 313 - DNA, 2229 bp, Artificial Sequence
  Description of Artificial Sequence: Synthetic polynucleotide
ttttttttttttttttcgttttcgattcggtggcgataggtttttgttgaaagtagattgttattttttcgtttatttattcgtaaaagtagcgtttttagcgttaaggtttggggaggcgcgggttaggttggagtttttggggtgtcgtttaggggtttagtttcgatttttcgaattagatttagtggttaaatattagagggtatttattttttttgtatcgatataatttatgtattacgaaatgtgtaaattttgtcggggtcgtatttgaatttagttagagaattggggtgtgttttgtatataagagacgatttaaagaaggtagaaacgaaaattcgatagaagtagtaatagttgttgtgggtgattgtggggtgatcgtaggaaaattcgagtttgggattgaagtttgtttaggaaggggcgattgttgtttaattttggagggagggatggcgaaggaagatgtttttaattttttattttgttaatttttatagtttgttttattagtttggtttaaatataaaagttgttaaatagaaaaatagagggtttggattaaaatttaatattttaagttaatcgatttgtatgattttgtataattttttttttattataatttatatatagtgaagtgtttagttttgaggaggaaagttggaagaattgttatgtatgtgtatattgttagttaggacgattatttcgataaagaaatagattatttatatgtttttttaaacgttgtaaaacgttaaagtaaaaatattttttgtaagttgttttaagaaaattttagaagatatttcggagtatcggggattttattttgtttttgatagtagtgttttttgaatagggtgatattttagttagggtatttgcgcggtttcgattttaatgcgaagttttaagcggttgcgttaggaatttcgtcgcgatcgtcgggttaagtcggagttattaagttttgagtcgtacgcgttgcgacgtcggtacgtagtaggaaaatagattaaaacgttttatagaaaatttcggcgaagtttcggaggattttggtttttaagattagttgggcgtatttttttcgggacgtttttttttttcggttttagcgtttttttgtttttagtcgcgcgtagttttgttttggtggtaaattgaaataagaaatggaaatatattggtttttgttgttgttagggatgagaggttgttgacgttcggcgcgtttgttcgggtttcgggtttttttgtagatttttggattggggtgtttgaggttaggagaggagggggatagttgttcggagttttcgcggtttagaggttttgggatgatttatggggggggcgcgttttgttttggtgagtttttcgtttcgagggtaggcgaggtgggtgggtaggggagtgtatgtcggagagaagagagaacgtttaattagagagaattttttgttttcggagttttagcgtttttagttttttaaatttttgtttaggaagtcgaaggatttaggtttaggtaacggtttggggtggggcggtaagagcgtcgttttgtattcggacgtcgtttgttaggcgttatttggttatgtgcgttcgtagcgtagggtttttcggttattagtataggtttttatcgaggtgatagttatcggattgggaaattaatattgcgaggattcggttatgtgatgatatcgttcgggggaattcgagtggaagtcgatcgttttgtggtgttattagataggtgagaagtagtttttttaaatagggttttttgttggaaggaggaggtatttttttttagttagtgagtttttttagttgtaatcggggttttttttaatattagttatcgcggtttttagaggtgtagttcggtatattttttttttgtagatgtataaatcggggatatttttatttttatttaagatgttttttttttatttagtagaggggtgcggagtaaattcgggataataatttgcgtgttgtttggaagtaggttttttagaaaggatgataaaaatttggtgatgcggaagaagtttttattgtgtttaggaaagggtagcggttttttagttgtatcggttttggtttcggtttttatttttagtacgttttgttattttaataaagagcggtttttttatttgattttaattcgtattagttagcgtcgaggaaaga

SEQ ID NO: 314 - DNA, 6887 bp, Artificial Sequence
  Description of Artificial Sequence: Synthetic polynucleotide
cgtcgttcgtgggtcgtcggtcggtcgtagttcgttggcgacgagggtattatagttgttttgatcgcgtagattatgtatgtttcggtttcgggaatttattatgtattagaatatattagcgtttgtattttaaaaggttaaattattggtttttagttagggattttcggtaagtggtttgttagtgacgagtgtttgtttatattggtatatagcggagttttttgttttcggtttattcgtttttaggaaagttttggggtgaggcgaaggcgattgaagtaatgtttttttttttagatcgtagttgtttaggggggatatagtacggtattttttatcgaatttttttcgttcgttcgtattttagtttttttttttttagcgatttttttatttttttttttttttttttttttgacgtttgattttagtagtaaaggaggtaaaaaaggtatcgagtcgttagttaaatttgaaaagtgcggtttcgttttttttatagttattggtagtttttcgtggaaggttcgtttttcggggtagttgcggtttcggagtggttgcgtttggcgttcgtcgggcgtggtttcgttttaggttcgggagggtaggttggttgtttcggcgagcggtagagtttttttggatagttttcgtttatttaaatagaagacgtcggcgtcggagcgggttcggatatggcgaggttgcgagtcggttcgagcggcggggttcggtgattttttttttttttttcgtttttttttttttttcgtacgtacgtttcgttcgtttttatttcgtttttatttcgggcgagttcgttcgtagttcggggcgtatattcgtacgcgtatttttttttatttattttcgcgttcgtttttattttcgtagtcgagtttcgttacgcgcgttttgttcgttcgtcggtcgttttcgtcgttttcgtcgttttcgggttttgatggattgaatgaaggttgtttatatcgtttatcgatgttttattaaagatttagaaggttgcgttatgaattcggagttgataatggaaagtttgggtattttgtacgggtcggtcggcggcggtagtggcgggggcggcggcgggggcggcgggggcggcggcgggggttcgggttatgagtaggagttgttggttagttttagtttttattacgcgggtcgcggcgtcgttggttcgttgcggggtttttcgtcgtttttaatcgcgtattaggagttgggtacggcggtagcggcggtagcggcggcgtcgcgttcggttatggttattagtatggtttcgattttggacggcggcgattatcggttcgagttttttatttcgttgtattacgttatgagtatgttttgcgattcgttttcgtttggtatgggtatgagtaatatttatattacgttgatatcgttttagtcgttgttatttatttttatcgtgtttgataagttttattatttttattcgtattattattcgtattattattattattattattattagcgtttgttcggtaacgttagcggtagttttatttttatgcgcgacgagcgcgggttttcggttatgaataatttttatagtttttataaggagatgttcggtatgagttagagtttgttttcgttggtcgttacgtcgttgggtaacgggttaggcggtttttataacgcgtagtagagtttgtttaattacggttcgtcgggttacgataaaatgtttagttttaatttcgacgcgtattatattgttatgttgattcgcggtgagtaatatttgtttcgcggtttgggtattttatttgcggttatgatgtcgtatttgaacggtttgtattattcgggttatatttagttttacgggtcggtgttggtatttagtcgcgagcggttattttcgtttttatcgggttcgtaggtggttacgtcgggttagttggaagaaattaatattaaagaggtggtttagcgtattatagcggagttgaagcgttatagtattttttaggcgatttttgcgtagagggtgttgtgtcggttttaggggatttttttcgatttgtttcggaatttaaaatcgtggagtaaatttaaatttggtagggagatttttcgtaggatgtggaagtggttttaggagttcgagttttagcgtatgttcgttttacgtttggtaggtaaggtcggggttagttaggggttaggttgttgggaagagggtttcgggttcggtgtttgtggtttaagtttgcgcgtcgagttattttttttgatttttttttttttttttttatatacgtttttttttttttcgtttttatttttttttttattttttttttttttttcgttttttttttatttttttttttttttttttttttttttttttattttttttttgtttttgagtttttattgatcgatttttttttattttattcgttttttttttaatgtgttaatttttgttttattttcgatttttttaggtattgggaggcgggatgggggtgtgcgtttttttttaggagttttgtttttttaagatttatagaaattaggatttgtttttatttaaaattttatgtattttaagttttttttagataatatattttaatttttcgggttgattagtttttttgtgtagaggtagttgagaggttttgttttgtagagggaaaagagttttttatttttttatttattatataggtaaatttatttggttattggttgaaggtatagttttgttttcgcggggaatcggcggttaggatataatagcgtttttggagtttatttttggttttggcgttggcgtagggattttttgatcgggtttgaggggttcgggttagttttaatgttattatttatagcgagggtagggtgtaaggttgagaaggttatatttatcgttttgggaggacgtgggagaagagattgaggtggaaagcgttttgttttgtttatcggtcgtttttgtttcggttttagcgtttgttgggatttgttaggatttgtcggggtttcgggagattttgagtattcgtaggaagaggtgttgagaaattaaaaatttaggttagttaatgtatttttgtcgtcggttgtaggtttcgtttttgtattaagcgggcgttgattgtgcgcgtttggcgatcgcggggaggattggcggttcgcgggaggggacgggtagaggcgcgggttatattgttttggagtcggttcggttttttgtgttttttttagcggttaagttgcgaggtatagttttttattgttttaggagtatagaaattttttgtgtgggcggcgggtgcgcgagttagagggaaagatgtagtagttattgcgattggtacgtagttgcgcgtttttgtgcgtacggatttcgcgcggtgtgcgtggcgattgcgttgtttttaggagtaagttacgggtttagaggggtaaaatgtttaggtttttcgttgggaaggatatattatattttatggtaagttagggtgggcgattttttatggatcgggtggaggggggtattttttaggatcggcgggcggtttaggggaataattcgtggtggcgatgatttgtatagcgcgggttttgggatgcgcgcggtttcgagttagtttcgtatagttcgttttcggagttgcgagtttaggtttttattttcgatttttcgggtttttttcgtatcgttgagtttagtttgtggggtgtattcgattaacgttcgatagggttggggaatgtgataggtagtaggtttattcgggtttggggagggggagttttcgttttgatagtatttttttttgtcgtttgttggtggatttttatttttagtcggtaatcgtttcgtagtgttgatttaagaaggtaaagaaaattaggtttttttgtaaagagttttttttaaatcggcggatttcggatattttgagtggatttagaaatttatgtaattttttttttttagtttattttttatttttttttatagttttttttgatttgttgttggttcggggtaagataaagtagttagtagagagcgataataatagcggcgggaaatgaattggagattggttgatagtttttaatattttgttatagattttttcgaatgttttaggttgtttttggtgggttttagtattcgtcggttttttgggtatcggggattagaaggaatttggtagttggttttaggggtatagttaaaggtaggatgatagttatttttttgtttattttagagcgttgtcgtttttttatgtcggtcgcgtaaagaatatagtttttaaaaaatacgtgttttttgtttatataggtttgaaagtgatgaggaaagtaatgtttcgtttattagcgagttttagtttttaaaatgattttaagcgttgttgagatgagaaagcgtggtatttcgggggtttttagttttattcgcgtttatggtgtaagtttgtagggataggttcgggatagtattgtttacgttgttagatttttcgtagaggatcgttgaagttgttttcgtgggagatagaatgttttttttagcgagtggaaaaggtttgttgaggatttcgttttgttcgagtatttaaatgtgtgtttgttttattattttgggttgaaaagggataagagttttagtttttttatttggttattttattagtaattataagtgtgttgagtggttattattatataggaggttttttagtttggggttagtagattagtttttttagatattgatgtagaagttgggattggtaagtaggtattatgtgttcggagcgttaggggataggagtaaatggagaagaaaagcggaggtttttttcgttcggagtatcgatcggaattttcgtcggtacgtcgtagagggttttcgtcgttgggtttcgggggtttaataagtttagtcgtttcgtaggcggttcggtcggatttttagatcggtgtttggaagatatcgtttttgtttttttttcgttaaatttgtttttttttttttttttataggttataggtttttttttttttttattttggtttcgttttcgggttttgttaaatagttaagtaggtcggggtttagggggtttagaatgaagaggtttgatttggttagcgtcggtaaagtttatttttaggcgaggttataatagaggtaggttttttttgtttagtttgtcggtgtagttatagttaagggtggtatttgaaaggaaaagggagaaaatttcggagaaatttagattgttttaacgttagattttagagaaattgattttaaatgtacggattcgttcggaaagggcggttaagtggtaggtggttgtaatttcgttcggtcgggttttcgtagaggttttttaagattagtttttgtagggcggtttttagtaatttgataagaggcggttaagataaatttttgcgggttcgagtatatattttcgggcgttgggttttagagatttttaaattaagtataaataagaagggagtgagagaatttaggttagaatttgtacgggtattttattgaggaaaagcgaggtttcggtggtaggtatgttttttttcgacgttcgaaaatcgagtcgagcgttcgattatatttattgtagaggttttcgtttttagtgagttcggattttttagcggtttgttcggagttggtttttagttttcgtcgtagttcgacgtacggtttttttttggtagtaagtttttagcggttagtttgaagttaattttgtttaggcggtcgagggtttttagttaatttattatgatgtcgtttgggttatttgatgttcgtagcggcgggatacggttcgggtagtgcgtagtggtttttgttaggggtatcgcgtgcgtgtttgtttttcgttgcgtcggggacgtttttgggtgatacgggtcgttgggtattttttaagtcgaggaaacggatttttttcgtagagtttcgcgtttattttttaattttttatttcgtttttcgttgttagggttttcgatttagtttattttttttggcggtttagttagggattagagttggagaggttgaacgtaattcgtgttagtacggaatagacgatatgtttgtttgttagttgtttggatgaataattgaaaagttcgttgtagtttgtgtttcgttaagtttcgggtgtcgggagaatatttttttaatacgtattagggtgggcgggagcgggtagaggaggcgggattcgagggaggagagtgaattcgagtaggagaagtagtttaggtagttaggcgttttcgatgcgagaggttgggtatttatttttattttaggttttttattgtgtggttatgttatttttttaaataaatgtgtatatggagggagatcgatgttgataatgtttagaagattaaaagagtattaatgttggtaataataacgtaaacgtgtggatttagattttattgatttggaatttgattcggcgcgtttttagtaagttcgacggcgcgttttttttagtagagcgtttattagcgttacggtttcgcggttttttagcggtgtcgtttcgttagttttgcgcgggttttttcgtttgatcgtagtttttttttcgcgaggttttagttcgttttattttttcgaggttttttttttttttcgcggggttttttgttttttgtattttttttttcgatttttgtattattcgtttttgtgcgtatatatcgttatttgcgttttcggcgattcgtttgggcggttgggttcgcgaagttaatgcgttgaacggtgttcg

SEQ ID NO: 315 - DNA, 6887 bp, Artificial Sequence
  Description of Artificial Sequence: Synthetic polynucleotide
cgggtatcgtttagcgtattggtttcgcggatttagtcgtttaggcggatcgtcggaagcgtaagtagcggtgtgtgcgtataggggcgggtggtgtagaggtcgggggagggggtgtagagggtagagagtttcgcgagaggaggagaaaatttcggggaagtaaggcgggttggggtttcgcgggggaggagttgcggttagacgggagaattcgcgtagagttggcgaagcggtatcgttggaaaatcgcggggtcgtggcgttggtgagcgttttgttgggaagagcgcgtcgtcgggtttattggaaacgcgtcggattaagttttagattaatgaaatttgggtttatacgtttacgttattgttgttagtattaatgtttttttaattttttaaatattattagtatcgatttttttttatatatatatttgtttgagaaagtgatataattatatagtggaaagtttggaataaaaataaatgtttagtttttcgtatcgagggcgtttggttgtttgggttgttttttttgttcgggtttatttttttttttcgggtttcgttttttttgttcgttttcgtttattttgatgcgtgttgggaaggtgttttttcggtattcgggatttgacgaagtatagattgtagcgaattttttaattatttatttaagtagttagtaggtaaatatatcgtttgtttcgtattggtacgggttgcgtttagtttttttagttttgatttttaattaaatcgttaggagaggtgggttgagtcgggagttttagtagcgagaaacgaggtgggaggttggggggtgggcgcgagattttgcgaagggggttcgttttttcggtttgggaggtgtttagcggttcgtgttatttaaggacgttttcggcgtagcgggagataagtacgtacgcggtgtttttagtaggagttattgcgtattgttcgggtcgtgtttcgtcgttgcgggtattaggtggtttaggcgatattatggtgggttggttaagggttttcggtcgtttgaatagaattggttttagattggtcgttgggagtttgttgttaggagagggtcgtgcgtcggattacggcggggattggagattagtttcgggtaggtcgttgggggattcgggtttattggaggcggaaatttttgtagtaaatgtagtcgggcgttcggttcgattttcgggcgtcggaagaaaatatgtttgttatcgaggtttcgtttttttttagtgggatgttcgtgtaagttttagtttgggtttttttattttttttttgtttgtgtttggtttagaggtttttggggtttaacgttcgagagtgtgtgttcgaattcgtagaaatttgttttggtcgttttttgttaggttgttgaaaatcgttttgtaagggttggttttggggaatttttgcgaaggttcgatcgggcggggttgtaattatttgttatttagtcgtttttttcgaacgaattcgtgtatttggagttaatttttttgaaatttaacgttggggtaatttaaattttttcgaagtttttttttttttttttttaagtgttatttttggttgtgattatatcggtaggttgggtaggaaggatttgtttttgttgtgatttcgtttaagggtgagttttgtcggcgttggttaaattagatttttttattttgagttttttaaatttcggtttgtttggttgtttggtaggattcgggggcggggttaaaatgagagagaaagggaatttataatttatgagagaaagagaagaggtaggtttggcgggaggggggtagggacggtgttttttaggtatcggtttgagagttcggtcgagtcgtttgcggagcggttgggtttgttaaattttcggggtttaacggcgagggttttttgcggcgtatcggcggggatttcgatcgatatttcgggcggagaaagttttcgttttttttttttatttgtttttgttttttagcgtttcgagtatataatatttatttattagttttagtttttgtattagtgtttgaagagattgatttattgattttaaattgaaaagttttttatgtaataataattatttaatatatttgtagttgttgataaaatggttagataaaaaggttaaagtttttgtttttttttaatttagggtaataaaatagatatatatttgaatgttcgagtaaagcggggtttttagtaggttttttttattcgttggaggaggtattttgttttttacgaaggtagttttagcgattttttgcggaaaatttagtagcgtgggtagtgttgtttcgggtttgtttttgtagatttgtattatgggcgcgggtggggttgaggattttcgggatgttacgtttttttattttagtaacgtttgggattattttaaaagttgaaattcgttaataggcgaagtattattttttttattatttttagatttatatgggtagaaggtacgtgttttttaaaagttgtgttttttgcgcgatcggtatgagggggcggtagcgttttgagatgagtaggagaatagttgttattttgtttttaattgtatttttaagattagttgttaagttttttttggttttcggtgtttaagaagtcggcgggtattaaaatttattagagatagtttgggatattcggggggatttatgataaaatgttaagaattgttagttagtttttagtttatttttcgtcgttattattatcgttttttattggttgttttattttgtttcgaattaatagtaaattagagaaaattgtaggagaggatgaaaaataaattaaaggagaaagattatataaatttttaaatttatttaaagtattcggagttcgtcgatttgggggaggttttttgtagggaaatttagttttttttatttttttagattaatattgcggggcgattatcgattgggaataggaatttattagtagacggtaaaggaaaatgttgttaaagcggaaattttttttttttaagttcgggtgaatttgttgtttgttatattttttagttttgtcgggcgttggtcgagtgtattttataagttgggtttagcggtgcgaggaaagttcgggggatcgggggtggaaatttgagttcgtagtttcggaagcgagttgtgcgaggttggttcggaatcgcgcgtattttaagattcgcgttatgtaaattatcgttattacgaattgtttttttagatcgttcgtcgattttgaaagatatttttttttattcgatttatgggaagtcgtttattttggtttgttatagggtatagtgtgttttttttagcgggggatttggatattttgtttttttgggttcgtggtttgtttttaggggtagcgtagtcgttacgtatatcgcgcggggttcgtgcgtataaaagcgcgtaattgcgtgttagtcgtagtaattattgtatttttttttttagttcgcgtattcgtcgtttatataggaggtttttgtgtttttagaataatagagggttgtatttcgtagtttggtcgttagaggaggtataaagagtcgagtcggttttagaataatgtaattcgcgtttttattcgttttttttcgcgggtcgttagtttttttcgcggtcgttaggcgcgtataattagcgttcgtttaatgtaaaggcggagtttgtagtcggcggtagggatgtattaattaatttgaatttttaattttttagtatttttttttgcgagtgtttagggtttttcggagtttcggtaaattttggtaaattttagtaaacgttgggatcggggtaaggacggtcggtgagtaaggtaaagcgttttttattttagtttttttttttacgtttttttaaagcggtgaatgtgatttttttaattttatattttgttttcgttgtaggtagtgatattggagttggttcgagttttttaagttcggttagaaagtttttgcgttaacgttaaggttagagatgggttttaggagcgttgttgtattttggtcgtcggtttttcgcgggggtaaggttgtgtttttagttaatgattaaataagtttgtttatatggtgggtgggagagtagagagtttttttttttttgtagagtaaagttttttaattgtttttgtatagggagattagttagttcggaaaattgaaatgtgttgtttaaaagagatttgaagtgtatggggttttgaataagggtaggttttggtttttgtgggttttggaaagatagggtttttagaggaaaacgtatatttttatttcgttttttagtatttgggaagatcggaaatagggtaaaggttggtatattgaggggagggcgaatgaaatgggggggggtcggttaatgaaagtttagggataaggagagagtaagaaagaaaaagaaaagggagaagggaaagtaggggaagagcggaagagaaagagaaaatggaagaagaaataaaaacgagaagaaagaggacgtgtataggaaagagaaggaaagaattaagagaagtgattcggcgcgtagatttgggttataagtatcggattcggagttttttttttagtagtttggtttttggttagtttcggttttatttgttaggcgtaaggcggatatgcgttggaattcgggtttttgaagttatttttatattttgcggaaggtttttttgttagatttgagtttattttacggttttggatttcggagtaggtcggagagagttttttgagatcggtatagtattttttgcgtaaagatcgtttgggggatattgtagcgttttagtttcgttgtgatgcgttgggttatttttttggtgttgattttttttagttggttcgacgtggttatttgcgagttcgatgaggacgagggtggtcgttcgcgattgggtgttagtatcggttcgtgagattgagtgtggttcgggtggtgtaggtcgtttaggtgcgatattatggtcgtaggtggggtgtttaggtcgcgggataggtgttgtttatcgcgggttagtatggtagtgtggtgcgcgtcgaagttggggttgagtattttgtcgtggttcggcggatcgtagttgggtagattttgttgcgcgttgtggaggtcgtttagttcgttgtttagcggcgtggcggttagcggggataggttttggtttatgtcgggtatttttttgtagggattgtagaggttgtttatggtcgggagttcgcgttcgtcgcgtatgagggtgaagttgtcgttgacgttgtcggataggcgttggtggtggtggtggtggtggtggtgcggatggtggtgcgggtgagggtggtggaatttgttagatacggtggagatgggtggtagcggttggagcggtgttagcgtggtgtaggtgttgtttatgtttatgttaggcggagacgagtcgtaggatatgtttatggcgtggtgtagcgggatggagagttcgggtcggtagtcgtcgtcgtttaggatcgaggttatgttggtgattatggtcgagcgcgacgtcgtcgttgtcgtcgttgtcgtcgtgtttagtttttggtgcgcggttggaggcggcggagggtttcgtagcgagttagcggcgtcgcggttcgcgtggtgggggttggggttggttagtagtttttgtttatggttcgggttttcgtcgtcgttttcgtcgttttcgtcgtcgttttcgttattgtcgtcgtcggtcggttcgtgtaaagtgtttagattttttattgttagtttcgggtttatggcgtagttttttaggtttttggtgaggtatcgataggcggtgtaggtagtttttatttagtttattagggttcgggggcggcgggggcggcgggggcggtcggcgggcgggtaaggcgcgcgtggcggggttcggttgcgggagtgggggcgggcgcgggagtgagtggagaggagtgcgcgtgcgggtgtgcgtttcgggttgcgggcgggttcgttcggggtgggggcggggtgggggcggacggggcgtgcgtgcgggagaggggaggggacggggagggagggagggattatcgggtttcgtcgttcgggtcggttcgtagtttcgttatgttcgagttcgtttcggcgtcgacgttttttgtttgggtgagcgggagttgtttagaagggttttgtcgttcgtcggggtagttaatttattttttcggatttggggcggggttacgttcgacgggcgttaagcgtaattatttcgaggtcgtagttgtttcgggaggcgggttttttacgggaagttattagtggttgtggagggggcggggtcgtattttttaggtttggttgacggttcggtgttttttttattttttttgttattggaattaaacgttaaggagagggagggaggagaaggtgggggggtcgttggggagagggaggttggagtgcgagcgagcgagagagattcggtgaaagatgtcgtgttgtgttttttttgagtagttgcgatttgggggaaggggtattgttttaatcgttttcgttttattttaaagtttttttggaggcgagtaagtcgggagtaaaagatttcgttatgtgttagtatagataaatattcgttattaataagttatttatcgagagtttttagttgggagttaatagtttagttttttaaaatgtaggcgttaatgtattttaatgtatggtaaattttcgaggtcgggatatgtataatttacgcggttagagtaattgtagtgttttcgtcgttagcgagttgcggtcggtcggcggtttacgggcggcg

SEQ ID NO: 316 - DNA, 3952 bp, Artificial Sequence
  Description of Artificial Sequence: Synthetic polynucleotide
ggtcgtagtcggagaggaataggaatcgtagtggggacgttttggttttcgggtttatagtattcgggacggacgcgtagtagcgcgggtcgggaattgggtattagggcgggatgggtgagaggttttaagggataaggtagggagaagcgtagcggggtgcggggaatcgtacgttttttttttgtttttgttttttatttcgaggcggtagggcgggcgggcgcggtttcgggggtgggcgggttgggcggggcggaggcggggtcgtagtattggttttatttagtttttttcgttcgtagttagagcgagtcgagtcgcggttagtttcggcgggtagggggggcgttggagcgtagcgtagcgtagttttattagttcgtaaagcggatcgagttggaagtcgagcgttgtcgcgggaggcgggcgatgggggtaggtgttatcggtcgcgttatggacgggtcgcgtttgttgttgttgttgtttttgggggtgagtgttagtcggagggggttcgttttttttttcgggattagaatttcgagaagagtcgggcgtcgttattaaggaaatagaatagagtattggggttttagatattgagggtgggtggtgggaaaggatttttgatgtcgggattacgaaggagggtttagggttttcggagcgtagaggcgattttttagggtggagatgagggtaagatcggagtacggatgtcggtttttaggtatcgtagggggcggtgggggagttgggaggggttttttaagagggggtatggggtttttcgatgtttaggtttttcggaagaggatattcgaatgtcgggatttcgaagggattttttttttagtatttcggtttttggagagtcgtgggatagaattaaggcgagagaaggagggggaattggacggggattagagatgagaggggcgagttgggttggggcggggagttcgggacgacgggatggaataatggaggaggtcggagggattggaggtagaggggattcggtaaggataatggggatcggttagataatgggggggaggggcgtcggagggagaggttggggagcgggagagaggttgagaagtgggttagggagggtagaagaggggcgacggcgagggcggtagagagatggaagtagaaggaaaggagatagagcggggcgcggattttgaagtggtcggggtttcgtttgttcgttgagggatagtgagacgagaagagagagtagaggtttggatatttttagcgtttgttttcgcgtttttgttcgcggttttttttagtttcggaattggggttgcggatttaaggttgggaggggagtgtttatttcgtcggggcgaattcgttttcggggtttttttacggtcggcgggttttttcgacgcgcgtgtttttacggtttgaagtagcgtagcggatcgcgagggacggagcgggtgtgtttttattcgggttggcggtggttacgtttcggggtgtagagcgtcggggcgtattaggcggggattttttttggtcgcgcgtagttttggttacgtaggcgggaggcggtaggtagggggcgttgcggggcgaggtaagtgtagttcgtcgttgtttgtttgcgagtttggggttgcgcgtcgttttttatttagttgcgcgattcgagcgtcgcgtttatcgcgtttcgtgggttttcgcgtttcgaagggtcgggattcggtttgagttttttttggttttcggtgtaagtcgttgggtatttaacgagacgggggcgttcggacgtttcggattttgtagcgcggtatttcgggttatcgattcggtaaaggtcggcgggtttttcgggtggttcgacgagattgttagatgtggtttgttttatggttatgaatcgaatgttttggaaggtttggtaacggaggaggcgtttttatttttttcgttagtattttttattagagtattgcgttttaaatttcggttttatagatacggagattgaggttttgagagtttaaacgatttggttaagattttatagtaagttgggttagagtcgtggttagatttttcgatttgatttttagttcggtatttttttatttttttagggggtagtcgttgttttagttcggggttacggttgcgttttttagtagggcggggggggttgatattgtttttagagttcgtcggcggtagagtttgcgggtgaggtgggtagagattttgttcgggtgcgggttttagttcgaaagtttagttttagttttttggagttgttaggatttgtggttgcgttcggggatttgggagcgatcgcgggtacgtttgttgattaacgtcgttggttagagacgttgtttagacgcgggtgggcgagcgtagattaggagagcggggaggagggatcggattttagaggggtaacgatttgggtttcgggtttgggtaagagcgagggttttcgcgcgaagatttaaggaaggaggggagttgggcgtggaggatttgggcgtttgggaaggtgtatttcgataggaatttgtcgtttgtagtttttgcggttttcgttttcgtttcggcgcgcggttgttcggtttgggatggttgtgcgcggttcgagtttttttttgggtcgcggtgagagagagagggttgaaattagagcgcgtttcggcgggtcggttggcgggtcgcgtcggtaatggaggtattttgttatttagacgtttgtaattagagtcgtcgggttggttaatgcgtttaatagggatggaacgagggtagtaaatgggcgtgcgtgagcggtcgggttgagttgggtggatggtggatggggaggtagtttcgcgggggacgggtttttatcgtattgttttagtttagtttggtttaagcgtttcgttttttttttgggggatcgcgtggggaggcgggaataatcgatgtgttgagtttttattaagtgttttgtatttttttggtagttttttttgaattatttaatttttataaggttttagtaaggtgaatttagttatttttatttcgtagttgaggaaatagaattttttagatttttaggttcgagattaggtttttttagtgagttagtggtggcgtttttgttggaatttaggatgtttggtttgggatgtttttttttttatatatgttaggttttttttcgttttttattttttagattatggaaggagtcgtggttttgagagattaaatcgtgttttatgtttttggttttatatatttagatttgagttttttttttatacgtagaggttttgtttttttttaagtttttatgttatattattttgggtaattagtttttttttttttaattttttttttatttaaagggagtgaggggtatgtgttagtgttttttttgggtttgtatcgattttaaaaggttttttaggtgtttgaaaattttttttattttatggcggtgattacggttttatttatttaagagttttttgttgaagttgttggaatggttagggttgattatattgaaatattcgtatggttttaaatatttttaattgtttcgttgttttttttttttttttaattaaaaaaaatgaaaatttttaaaagttaatttatttaaggatttttttattttagttttttgtaagttttgaaatggttaaaataaaaagattataagcgtttttaaaaatgagatgaaattattttgttaaatgtgaaatgattaagtgtaatatatataaattttagggaaatttatttgttatttttataaattaatttttttggatttgattttggagtaattagtttgaatgttagttatttttttttatttggttaaattttttttttttgtttggggtttttttaagatgagatgtttttttgataattaatatttatt

SEQ ID NO: 317 - DNA, 3952 bp, Artificial Sequence
  Description of Artificial Sequence: Synthetic polynucleotide
aataaatgttagttattaaagaagtattttattttaaggagattttaggtaggaggggagagtttagttaagtagggaggggtgattaatatttaggttaattgttttaaaattagatttaaaaggattaatttatagggatgatagataaatttttttgaaatttgtatgtgttatatttagttattttatatttgatagaatgattttattttatttttaagaacgtttgtaatttttttgttttggttattttaaggtttataaggaattaaggtggaaggatttttagatgaattgatttttaagaatttttattttttttaattagagaaaagagagaaatagcgaaatagttgaaagtatttgaaattatacgaatgttttagtataattagttttggttattttaatagttttagtaaagagtttttaagtgaatggggtcgtggttatcgttatgggatgggagagatttttaaatatttggagggttttttgaggtcgatgtaaatttaggggaggtattggtatatattttttattttttttggataggggaggagttgggaggaaaggagttaattatttaagataatgtagtatagagatttgagagggggtagggtttttgcgtgtggagaaggggtttagatttaaatgtgtggggttaaaggtatagggtacgatttaattttttagagttacgattttttttatgatttagaaggtagggggcgggagggagtttggtatatgtaggaaagagaatattttaggttaagtattttgggttttaataaagacgttattattgatttattgggggagtttggtttcgggtttgaaagtttagaaggttttgtttttttaattgcgaagtgggaataattaaatttattttgttaggattttataaggattaaataatttaagagaaattattagggaagtgtaaggtatttagtaggaatttagtatatcgattattttcgtttttttacgcggttttttagggaagaagcgaggcgtttgagttagattgggttggaatagtgcggtaggggttcgtttttcgcggagttgtttttttatttattatttatttagtttagttcggtcgtttacgtacgtttatttgttgttttcgttttatttttattaggcgtattagttagttcggcggttttggttatagacgtttgaatgataaagtgtttttattatcggcgcggttcgttagtcgattcgtcgggacgcgttttggttttagtttttttttttttatcgcggtttaggaagaaattcggatcgcgtatagttattttagatcgagtagtcgcgcgtcgaggcggaggcgggagtcgtaggggttgtagacggtaggtttttgtcggggtatatttttttaagcgtttaggttttttacgtttagtttttttttttttttgggttttcgcgcggggattttcgtttttgtttagattcggagtttaagtcgttgtttttttgggattcggtttttttttttcgtttttttggtttacgttcgtttattcgcgtttgagtagcgtttttaattagcggcgttagttagtagacgtgttcgcggtcgtttttaaattttcggacgtagttataggttttgatagttttagggaattggggttgagttttcgggttggggttcgtattcggatagaatttttgtttattttattcgtaggttttatcgtcgacggattttggggatagtgttaatttttttcgttttgttgggaaacgtagtcgtgatttcgagttgggatagcggttgttttttgaaaaggtgggggagtatcgagttgggaattaggtcggggagtttagttacgattttggtttaatttgttgtgagattttggttaagtcgtttaaatttttagagttttagttttcgtatttgtaaagtcggaatttggggcgtagtgttttgatgaaagatgttggcggggagagtgaagacgtttttttcgttgttagattttttagggtattcggtttatggttataaagtaggttatatttgataatttcgtcggattattcggaggattcgtcgatttttgtcgagtcggtggttcgggatatcgcgttatagaattcgaggcgttcgggcgttttcgtttcgttaggtgtttagcggtttgtatcgagagttaggagaggtttagatcggatttcgatttttcgaggcgcgggagtttacggagcgcggtgggcgcggcgttcgggtcgcgtagttaggtggggagcggcgcgtagttttagattcgtaggtaggtagcggcggattgtatttgtttcgtttcgtagcgttttttgtttgtcgtttttcgtttgcgtagttagagttgcgcgcggttaggaagggttttcgtttagtgcgtttcggcgttttgtatttcgagacgtagttatcgttagttcgggtaggggtatattcgtttcgtttttcgcgattcgttgcgttgttttaagtcgtgagaatacgcgcgtcggaggagttcgtcggtcgtgggggaatttcgggagcgggttcgtttcggcgaagtgggtattttttttttagttttagattcgtagttttaatttcgggattgggagaggtcgcgagtaggagcgcggggataggcgttggaaatgtttaagtttttgtttttttttttcgttttattgttttttagcgggtaggcgggatttcgattattttagggttcgcgtttcgttttgttttttttttttttgtttttatttttttgtcgttttcgtcgtcgttttttttttgttttttttaatttattttttaatttttttttcgttttttaattttttttttcgacgttttttttttttattgtttggtcggtttttattgtttttgtcgggttttttttgtttttagttttttcgattttttttattgttttatttcgtcgtttcgggtttttcgttttagtttagttcgttttttttatttttagttttcgtttagttttttttttttttttcgttttggttttgttttacgattttttagagatcgagatgttgaggggaaagttttttcgggatttcggtattcgagtgttttttttcgaagaatttgggtatcggagagttttatgtttttttttgaaagattttttttagtttttttatcgttttttgcggtatttgaggatcggtattcgtgtttcggttttgtttttatttttattttggagagtcgtttttgcgtttcgggaattttagattttttttcgtggtttcggtattagaggtttttttttattatttatttttagtatttgggattttaatgttttgttttgtttttttggtggcggcgttcggtttttttcggagttttgatttcgggaaagggagcgggtttttttcggttaatatttatttttagaagtagtaatagtagtaggcgcggttcgtttatggcgcggtcggtggtatttgtttttatcgttcgtttttcgcggtagcgttcgatttttagttcggttcgttttgcggattgatggggttgcgttgcgttgcgttttagcgttttttttgttcgtcggagttggtcgcggttcggttcgttttggttgcgggcgggagaggttgggtgaagttagtgttgcggtttcgttttcgtttcgtttagttcgtttattttcggaatcgcgttcgttcgttttgtcgtttcggggtgggaagtagaggtaaagggagggcgtgcggtttttcgtatttcgttgcgtttttttttgttttgttttttagagttttttatttatttcgttttggtatttagttttcggttcgcgttattgcgcgttcgtttcggatgttgtgggttcggggattagggcgtttttattgcggtttttgttttttttcggttgcggtt

SEQ ID NO: 318 - DNA, 2820 bp, Artificial Sequence
  Description of Artificial Sequence: Synthetic polynucleotide
tttaggggataatatttaggtatgttaacggagtttaaaatgttaaggaaattatattataattttgtttagtatattataggttgttaaatcgaaatgttatgttagttaggagtgtagtaatttttattttttggttttatttaattaggaagttttagtagagcgaagtttgttaagcgttcgtcgttagaatttgaaggaattcgagcgagtaagaagagtgtttgatttattttatagaagtttgtttagaaatggaggagttagcgtttattgaagtcggtttcgttttcggttcgtttatatggagtttgattagttttagttatgtttatttcggtttgggagattcgtaaagtgtttttttttttaatttttttgtattattttgaagtttagggaagtaaagagaggggtatatttggattgtaaaattaatgttttttgtcgtttaggagagaagggaatgagagagagagagagatagatagatagagagagagagagagagagagagagagagagagagagagagagagaaattttattgaaatttagtttttttagaatttgtgtgatttggtttttaacgggagattagtgcgattttatggtatttttgttaggaattagcgatttttttgtagttattatttgatttattgttttttcgtttatttttttttataaagttattttttttttattttagtaagatttttttttttaatgatgataaagtttttgttttagtgttttttttaggattggtgtttttttaaaatagtgaatttagaaaattatttcgtttaatattttttaaaattttcgtagttttaatgtaagcgtaagtatgtaaaggttttttgttatatttgtattttttgtttattttagaattattttttattttcgggtttgtaatagttttttttgtttttttggatagaggtgggtggtattaggggtttagggtagtaggaggtgaggggttgaggaggtcgttagggtaggttggtttgtgttggatacgcgtgtttttttgcggagttaaagggtcggggacgggggttttggatttattagagtaattttagtcggtgggcgtttggtagttatttaaggaggtagggaaagtagcgagttttatcgggcgggttacgatgagtagtatgacgggtagtagtagtagttagtaaaagttttcgtaaagtgtttagttgttgtattgtcgcggggatttttatagtattatgattagttcgtgtaattttgtagtagtaaacggttttcgaggaatataggatcgcgggggtcgggtagcgggttattgagtatttcgcggacggcggtagtagaggcggcggcggtggtagtggtattcggcggggaagtagtagttaaattcgcgtatgatttcgagagttttagtaatatttagggattgggtttagtttcggagcgagagggtcgttcgttgagaagttgcgtcggagacgcgggaagttgttgttataaggagggagttttgggaagtcggaggataggaggagacgggagtttaggggtagacgagtggagttcgaggaggtagggtggagggagagttaaggcgtttcgtagttcggtagtcgtttttcgagttttgtcgttcgtatttttttggcgtttgggaagtagtaggtttttagttcgttcggggttacgtgggaagaggtagtcgggttttgattggtggagtaggatgtaggtttcgggagggaggggtcgacgaggaggtgtaaggatgtaaggaggaggcggtcgcggaagttatagatgggttcgttcgttaggcgttggttcgagtggggttaggcggggatggtttaaatgagaagttcgggttttagggtgggttattcgtatatttatatattattcgttttatttttcgttttaggacgttttttatcgaaggcggggttcggattagcgtttttttttcgcgcgtgatttcgggtcgcgagtgcgggtcgcggttgggtggcgttttttcgagttggagatggtgggggcggaggtgttagaggagtagtagtagtagggtagagaggggcgagtcggcgcgggagagggcgttttgttggcgatcggcgttttagcgtgcgggagcgcgtcgtttaggttgtagggggatgtaggttgggaatgtcgcggcggagaggttagggacgtttttttagggatttataggaaagagggtgagaggcgatggtgttagaatcgtttttgtcgatttggaagtaatagtagtattttttataagagcgtgtaattttaaggttgttcgtcgaggtagtttagttatttcggtaggcgttttttttttttttttttttttttttttttttttttaggtttttcgtagtttcgatttagtttaagcgttcgtaggtttgaatttttttttttattattcgtttttttttagttcgtagtttattagtgtgtttatttgggaggtgcggttagatgtgtttggaaggttagattggtcgggataagtggtttgagagaaagagaaaggtttttttgtatacgtcgcgggtgggttgtcgggagtatcggtcgggtagcggcgttcgggaaggggagagcgggttttatttgttggtttaggtagtgattttgcgttttttattcgggtttttgtcggatggtcggtgatttggggcgacgagagaaggtttaattcggtaggagtttttggttttgcgcgttttttttattttttttagcgggaagggtaaacggtatagcgggattcgtttttcg

SEQ ID NO: 319 - DNA, 2820 bp, Artificial Sequence
  Description of Artificial Sequence: Synthetic polynucleotide
cggaaggcgggtttcgttatgtcgtttgtttttttcgttggagagaatgaaagaaacgcgtagagttagagatttttgtcgagttagattttttttcgtcgttttaggttatcggttattcggtaaagattcgagtaaggaacgtagggttattgtttgggttaataaatggagttcgttttttttttttcggacgtcgttgttcggtcgatgttttcggtaatttattcgcggcgtatgtagaggagttttttttttttttttagattatttgtttcgattaatttgattttttaaatatatttgatcgtattttttaggtggatatattaataggttacgggttggagaggagcgggtgatgaggagagggatttaaatttgcgaacgtttgggttgggtcggagttgcggggggtttgggaggagagaggggagaagagagaaggaaggagagcgtttgtcgggatggttgagttgtttcggcgagtagttttggggttgtacgtttttgtgggagatgttgttgttgtttttaggtcggtaagagcggttttaatattatcgttttttatttttttttttgtaaatttttagagaaacgtttttggttttttcgtcgcgatatttttagtttgtatttttttatagtttaggcggcgcgttttcgtacgttggagcgtcggtcgttagtaggacgttttttttcgcgtcgattcgtttttttttgttttgttgttgttgtttttttgatattttcgtttttattatttttagttcggagagacgttatttagtcgcggttcgtattcgcggttcggggttacgcgcggaagaggggcgttagttcggatttcgttttcggtagggggcgttttggagcggagagtgaggcgaatggtatatgagtgtgcgggtagtttattttgaagttcgagttttttatttgagttattttcgtttagttttattcgggttagcgtttggcgagcgagtttatttgtggttttcgcggtcgttttttttttgtatttttgtattttttcgtcgatttttttttttcgggatttgtattttgttttattaattagagttcgattgtttttttttacgtgatttcgggcgggttgaggatttgttgttttttaaacgttagagggatgcgggcggtagagttcgagaggcggttgtcgggttgcggggcgttttgattttttttttattttgttttttcgggttttattcgtttgtttttggattttcgtttttttttgtttttcggttttttagagttttttttttatggtagtagtttttcgcgttttcggcgtagttttttagcggacgattttttcgtttcggggttgagtttagtttttggatgttgttgaaattttcgagattatgcgcgggtttggttgttgttttttcgtcgggtgttattgttatcgtcgtcgtttttgttgtcgtcgttcgcgggatgtttagtagttcgttgttcggttttcgcgattttgtgtttttcggaagtcgtttgttgttgtagagttgtacgaattagttatggtgttgtgggagttttcgcggtagtgtagtagttggatattttgcgagggtttttgttggttgttgttgttgttcgttatgttatttatcgtagttcgttcggtgaagttcgttgttttttttatttttttaagtgattgttaaacgtttatcggttggaattgttttggtaagtttagaattttcgttttcgattttttaatttcgtagaagaatacgcgtatttagtatagattagtttattttagcggtttttttagttttttattttttattgttttagatttttaatattatttatttttatttagagaaataaggggaattgttgtaggttcgggggtgaggggtggttttgggatgggtagaaagtgtaggtgtagtaggaaatttttgtatgtttgcgtttatattggagttgcgaggattttgagaaatattaaacgggatggttttttgggtttattgttttgaaagagtattaattttaggggaaatattgaaatagaagttttgttattattaaagaaaaaagttttattaggatgaggaagaaataattttatgagaaagaatgagcgagaaagtaataaattaaatggtgattgtaggggaatcgttgatttttggtaaaggtgttatgaggtcgtattggtttttcgttgaagattaggttatatagattttagaggagttgggttttaatagaatttttttttttttttttttttttttttttttttttttttttttttttttatttatttattttttttttttttttattttttttttttttaggcggtaaaagatattggttttgtagtttagatatgtttttttttttgtttttttaagttttaaggtagtataggggagttgagaaaaagaatattttgcgggttttttaggtcggagtgggtatgattgaggttggttaggttttatgtaggcgagtcgagggcggaatcgattttagtgggcgttgatttttttatttttggataggtttttgtggagtgggttaggtattttttttgttcgttcgggtttttttagattttgacggcgaacgtttggtaggtttcgttttgttgaagttttttaattaaatagggttagaggatgggagttgttgtatttttagttggtatagtatttcggtttgatagtttgtagtatattgggtagaattgtggtgtaatttttttggtattttaaatttcgttaatatgtttgggtattgttttttagg

SEQ ID NO: 320 - DNA, 2265 bp, Artificial Sequence
  Description of Artificial Sequence: Synthetic polynucleotide
tatttttatttagcgtgtttagggtattcgtatcgtgttagtttgtggcggtttttaaattaattttgattgagtttttgaggtagttttttatttttattcgtattaatttagtacgtttattaaaatttttaagtaattttttttttgttacgtaaacgttaggagttgtttgatttttttttttttttatttttattttttttttagtttagtcggttttttggtcgggtaagttgggaatttagcgattgaagggttttggaaggtgtcggaggggagagacgttagttcgaatttttatagggtttttttattaaaaatttttaaaatgttggttcgagaaattttttttgttggagggtttgagttttatttttttttgtcgcgtgcgtttttattgtcgtgaatcgttgtgatttttaatttattattttatttcgcgtttttagcgttttagtcgttttgtatttgtttagttttttttttgtttatgtatttggttggttggtggcgtttgggacgcggttgtaggcgtcgtcgtattggtggtaggagttagcgtagttatagtcggtataagttttggttgggtagttttcggcggagtcgtttacgtcgtgatattgatattggtaggggttgagagttttgttataggaagtcgaggtaggagagtagtagtcgtgcggggtttttttcgtagggttgtagtagttagaatcggtagttgaagattcgggtaaagttggcgatttttgagacggatggtgtatagttgcggacgtttggaacggagtttggaagtcgtcggatcggatgttggggatttttttgttaaatatttttgttatcgtttacgggcggcggtagcggttgtttttgttgttgtggcggcggtagttgttttagttggttgtggggttgttttggtttaagtagatatggttgtgggagcgagggaggaggaggaagaggaggaggagagaaggaggaggcggcggtcgcggcgaggaggagattgggagtcgtgaagtttttgttttcggtcggttgattgttggttgaggcgtagtatagttttggttaaatttttaattgcgcgtttacgtatagcggggtggatttggttttattggttagggtttcgggagtaatagtaatattttaattcgtttaattagttttagtataataaagtattgtttaaaaagggggtggggggtattgagggggtgtgtgtgtttgtgtgtgtgcgcgttcgcgcgtttgtgtgtgtttttgtttgttgtggagtggggaggggttttagtttatttgtttttagtaaattttaaagatatcgtagaagttatagtataaggttttgtgatgtttggggataatgtgttttaattagaagttttaaaagtgtatatgttttgggaatgaggtgggcgattatttttttttgttttttattatttcgttttcgtgggttgtattaaaggcgagtgtagaattaaatattgatattgaaatagggagttaaggtgtagggagtggggagcggggggatgtaggatggaggtaagaaggaagggaaatagtattttttttttttttagtggagtgttgggaagtaagttgtaatttatatgttttgaaaatttgttttttggggaaagaggtaattttttttgtaggagatgagtatttttcggacgcgggttggataggaatgtttaagaaggtataatgtttattaagtcggtgaatggtagggagagtttttgtagtttaaagtttttataatgatttttaaaaattattgttttaaatatatataatttaaggaagtttaaattttcgttgttggtttgtaaaaagagttaaatagttttatttttgtttaatatttttatttatttttaagatattggaataaaggttttttaattatgtttagtggttaaagattttcgtaaaggtgaatggatttatgtataatttgttatatttttaggaaagaatgggaaagtttcggaagtggggaaggagataaggattaaagtttttgtaaagttagatgatgtttattgattttttttttttggttttatgaatgtggtttagtttttttattttttagattcgggtttttgtatttttttttttttattttttgttgtaaagatattttatttagttcgtatgtaagggaagaaaggatttaagaattatttagttgatatacgagatttaaattttgttttttaggaggtg

SEQ ID NO: 321 - DNA, 2265 bp, Artificial Sequence
  Description of Artificial Sequence: Synthetic polynucleotide
tattttttgaagagtaaagtttagatttcgtgtattaattgaatgatttttgaattttttttttttttgtatacgagttaagtaggatgtttttgtagtaggaaataaaggggagagggtatagaaattcgggtttgggaaatggagagattgggttatatttatggagttaggagggggaaattaatgagtattatttgattttgtaaaggttttgatttttgtttttttttttattttcgagatttttttatttttttttggaggtatggtaggttatatatggatttatttatttttgcgggagtttttggttattgaatatagttaaagagtttttattttaatgttttgaaaatagatgaaaatattaaatagaagtggagttgtttggttttttttgtaagttagtaacgaggatttgggtttttttaagttatatgtgtttaagatagtaatttttaaaagttattataaggattttgggttgtaggaattttttttgttatttatcggtttaatggatattgtgtttttttgggtatttttgtttagttcgcgttcgggagatatttattttttgtaaaggaagttgtttttttttttaaagagtaaatttttaaaatatgtaagttataatttgttttttaatattttattaaaaaaaaaaaaaatgttgtttttttttttttttgtttttattttatattttttcgttttttattttttgtattttgattttttattttagtattagtgtttaattttatattcgtttttggtgtagtttacgggggcggggtagtgggaagtaaggaaagatggtcgtttattttatttttaaaatatgtgtatttttgaggtttttgattggaatatattgtttttagatattatagagttttgtgttgtggtttttgcgatgtttttggaatttattaaaaatagatagattaagatttttttttattttataataagtaaaaatatatataagcgcgcgggcgcgtatatatataaatatatatatttttttagtattttttattttttttttaagtaatgttttgttgtgttaaaattagttggacgagttagggtgttattgttgttttcgaggttttggttaatagaattagatttatttcgttgtgcgtaagcgcgtaattaaggatttaattaaggttgtgttgcgttttagttagtagttagtcggtcggagatagagattttacgatttttagtttttttttcgtcgcggtcgtcgtttttttttttttttttttttttttttttttttttttttcgtttttatagttatgtttgtttagattagagtagttttatagttaattagggtagttgtcgtcgttataatagtaaggatagtcgttgtcgtcgttcgtgagcgatgataggagtgtttgatagaagggtttttagtattcgattcggcgatttttaagtttcgttttagacgttcgtagttatgtattattcgttttaggaatcgttaattttgttcgagtttttagttatcgattttgattattatagttttacggggggagtttcgtacggttattgtttttttatttcggttttttatggtaaagtttttaatttttattagtattagtattacggcgtgaacggtttcgtcgggagttatttagttaaagtttatgtcgattatagttacgttagtttttattattagtacggcggcgtttataatcgcgttttaagcgttattaattagttaggtatatggatagggggaaggttgggtagatatagggcgattaggacgttgggggcgcgagatggggtggtagattgggggttatagcggtttacggtagtgggggcgtacgcggtagaagggagtaggatttagattttttaataaagagagtttttcgggttagtattttagggatttttagtaggagagttttgtggaggttcgaattagcgtttttttttttcggtattttttaaggttttttagtcgttgaatttttagtttgttcggttaggaagtcggttaggttggaaaggggataggggtggagagaagaaagaattaagtagtttttggcgtttgcgtaataaagagaaggttatttgggaattttggtaagcgtgttgggttggtgcgagtgggaatagaaggttgttttaaaaatttagttaggattagtttgagagtcgttataagttagtacggtgcgggtgttttgagtacgttgggtgggggtg

SEQ ID NO: 322 - DNA, 5907 bp, Artificial Sequence
  Description of Artificial Sequence: Synthetic polynucleotide
gtcgtcggagtagggttttagcgtatcgcgagtttttgtttttttcgttttgtagcgtcgcgagtttttttttttttcgcgtttggtttcgtttgcgtttttttcggcgtgggtattcgtagattcgttaggaggttgacgagaggtgtttttatagagttttgtttttttttagatttttaaacgaaaagaaagagaaaagttaatttttcgtttttattttgtacgtatttggagagcggttggtggcgagcgattcgtataatcgtttttttcgcggcgtttttggacgggcggagagaattcgggtgattgagtttgaggttgagtttttttgggagcgatttatgttagttatttttatttttaagggggattcgcggtcgggtttacgcgcgaaggatgggtgttagggaaattgatttatagacgattcgtttcgcgagagattgataatttagttttgcgggttttcggggcgtttagattagtttttagttagaggatttggggttgtatagttttcggattttggagggggtggttcgggggtgggagattgcgagtattagtttacgtcggtttttttttattttgcggcggcgaggtgggaagggttaggatgcgagtttagtattttttttagaaatgtagtatttcgtttttttattttttttgttttcggcgtttttttttttacgcgttttttttcgttttttttttaagggcgttttttttttgtttttagtttacgtttgaatttttcggcgttttttttttttttttttagttttttttttacgttttttgttttcgggtattttttttttttaattttttattttcgtatcgtttgatttcgaggggcgggagcgtattgggttgcgtacgggtgggggcgtcgcgttagtttcgcgtagttgttttgacgtcgttgtcgtcgtcgtcgtcgtcgtcgtttttcgtagtttagttcgcgtttcgcggtagtttcgtagtgtattagttattatcgtcgtcgtcgtcgtttcgttagatttgttgttagtttgttcggtttagttttgagagagtttcgaacgttagttgcgagggttatgagttagagagtttcggggcgtcgcgcggagagtaagcggagatagcgattttgcgttttttagttttcgtttttttgtatcgcgtttttcgtattttcgggtttttttgtttttttcgttgtttttatcgtcgttatggttattttgtttcgtagtaagttgtttaacgtggttacgttcgtgtttaataagttttaggttaagatgagcggtatgttcgttaggatgggtttttaggcggttacggatgaggaggcggtgggtttcgcgtattgcgacgatttcgattttgagtatcgttagggtttgtagatggatattttgaaagtcgagggagagttttgcggggacgagggcgttgaagcgttcgtcgagggagatatttattattagcgaggtagcggagtttttttgtcgtttttcggttttaaggattaggtgggaggtggtggcgaattcgggggttacgataagtttaaaattacggcgtgggaggtaggttggaacgtgattaacgttatttaggtaagcgcgggatttttagttttgtttgttttttttttttttagtttagcgtgtcgggttttgttttcgatagtcgttcggtgatttcggtttggagatttttttttgtatttaggaatttttttttttttattttttttagttttgcgcggggatttacgtttttaggcggtgtttttcgttttaatttacgtttttttttaacggtattagttgtaagatcgttaggttgaagttcggtttgagatatttgttcggagatattgtaaaagtgaaggaaatggggggagggagtaggaagcgatgagaaagaaagaaaattaggattggagggtacggtttggttttggattttggaacggatttatagttgtatttttgggaggaaagaagaaggggaaatcgttgaggtcggagtttttttttttcgtatatacgtatagatacgtatacgtatataggtaggtatattatatgtttatagtttttttttttacgaataaaggcgtaggtataggcgtatacgatatgtatttatatatagattatagtattatttttaaatgtatttgcgtatatttttatagttttataaataaaagtatatatttgtatatattaaatatacgaatattcgtttgaatatatgtatatatatatgtatagatgtatgtagataggaattagtttgtttttttgggtgcggttttgttggagatatataggtatatatatacgaaagtatatatatgtttttatataaatatatttagttcgtaataatttagtattatttgtgtatagattcgtttttttcgttcgaaatttcggttgtatcgtaaagaggcggttagttttttttcgtgtgattttggcgaagttttttttagaggttaagaatggtttttgttttttaggttttttttttttatttttaattttttattttttattaggcggcgtaggatttttatatagggagtaggtttggagttttggtaacgattttcgagttagtaggggttggtaggtcgtagttttttgggtcgaaggagattttagttttaggtaatttcggttttttatagtttggtttcgcggcgtttttggagcgtattattattggggttacggaaggtaggttttttgggagtagaggttttttaggggttgttttatgtatcggggtaagtaggattttatcgggtttcgaatattagatggttcgatttaaggcgtttttcgtttcggggttcggcgagacggttttgttggattacggattcggggttgttttcgttttcgttgtgtttcgcgatttttcggggcgttttttaaggtttcgtttgataggttttaagggaggttagggtaggaggttggaggttcgtaggttttcgggattttggatttcgttagtttttagttttcgtgtggattttaaattttatagttttgttcgtttgattttgaagtttttggttttagatttttgttcggttcggttttttggtttttttggcgttttttcgttaagtttttttttttgtttgtttttttagtttttatttagtttttttttttaggtttcgttttcgttttattttaattttagttttgttttaagatttttaatttttagttttgttttttttttttcgcgcgttgttttttaagcgtttttatattgtttttgtttttgttttttaggggttttgttttatttttagtttttttttttttttattttatttttttttcgttttataattgtagtttttaacgtttttttttttggtttgagtttgagacgttcgagtttttttttttagttttcgtgttttattttagttttattataaatttcgtgtttattttttttattggtttaggtttagtttattattttttttagagttttttttcgattacgtttttttttgtttttttttatttttttttttaattttttattttgtttttgtttttagaaattatttcgaagtatttttttttttttttgtggtttttttttatttttagtttttttttattttagttttttcgttattattagttattagcgtattttttttttttagattcgtttatatatttttttttttttatttttggttcgatattcgggtttattattagtttttttatatttatttcgtagtttgtttttaatttttttttttcggcggtttagatttaatttttagtgtttttagcgtttttttcgggttatagcgttaagttacgtttttcgggttttttattcgttgttaagttcgttgagcgttcgcgtttggttgttttttcgttttatagggtatgttcgtgttgggtttattttacgttattttgtacggcggttatttggggttgttttttattattttcgtcgtcgttgtgtgttgttatatcggtaagatttttatcgcgtgtttgtacgaggagaatgaagacggcgaggtggtgcgcgtgcgggattcgtacgtggttatagttaacgtttgttgcgtttcgcgttttttaacgttgggcggtcgagtggtgaacgtagcgtagattatcgagttggtgatgacgtgtattttgtacgtggtggtgagtggtaattttatgtataatagtttttcggggttgttcgtgtcgtagaagttttggtttattatcgttacggtcgtgttgttgttttgcgttttttttaagaattttaaggtcgtgtttaagtttagtttgttgtgtattttggtttatttcgttattaatattttggttatagtttattgtttatcgcgggcgcgcgattgggtttgggagaaggttaagttttatatcgacgttaagaagttttttatttttattggtattatcgtgtttagttatacgttttagatttttttgttttcgttggagggtaatatgtagtagtttagcgagttttattgtatgatgaattggacgtatatcgtagtttgcgtgtttaagggttttttcgcgttcgtcgtttattttatttgggtcgacgagattaaggaggttattacggataatttgttcggttttattcgcgtcgtggttaatatttttttggtggttaaggcgttgttgttttattttttgttattttttgtcgttgtcgaggtgttggagaagtcgtttttttaggaaggtagtcgcgtttttttttcggtttgttatagcggcgacgggcgtttgaagttttgggggttgacgttgcgttgcgcgttcgtcgtttttacgttgtttatggttatttatgtgtcgtatttcgcgttgtttatgggttttatcggtagttttacgggcgtcggtttttgttttttgttgtttagttttttttatttgcgtttgttttggcgtaagttgttgtggtattaagtttttttcgacgtcgttattttcgttatcggcggtatttgtagcgtgttcggtttcgtgtattttttcgagggttttatcgaagtttatcgaattaacgcggaggattagggcgtaagggcgagttttcgtcgcgtttttgcgtttttttttttttttttttatttcgtttttattagtttagtgcgttttgtcgtcgcgttgggaggttaagttttaaatatttttggtttttagtttttgattattcggggatgggggggatgggaggggatagggatttacgatttatcgcgtttgcgtttttgttgtttttttttttttataatattttggttttggggggaggcggggtgtatttgcgggtagggttttttgtttttttaagtggggtttcgatattttggttttagttatcgagggggttgggaagggagggagagggggcgtagttcgtaggcgtggtaatttgattttgggggaatattttatatttatttagagttcggaatttatagcgtttagttatttttagtaagagcgttttttatttcggagacgttttaattttgtagcgggaaaggttgattgggaaatttattttgggtgggtaattttttttaacgaagtcggaaggcgagaagtcgcggcggggttagtttgtttgtcggtttttaggaatttaaatttttattttgtgtaatttattaggtgtggaattgttttattgtgcgtgtggtgtgttcgtggtgaataagatgaaatgtatattagaaaaaaatttatttttaatttagagtgcggtatataattatattcgtaaataaagaagagataaaggtttgcgcggttcggtgtcgggtttgtg

SEQ ID NO: 323 - DNA, 5907 bp, Artificial Sequence
  Description of Artificial Sequence: Synthetic polynucleotide
tataaattcgatatcgggtcgcgtaagtttttgttttttttttatttgcggatataattatgtatcgtattttaaattagagatagatttttttttgatatatattttattttatttattacgagtatattatacgtatagtagaatagttttatatttgataaattgtataagatgagagtttagatttttgaaaatcggtaggtaagttggtttcgtcgcggtttttcgtttttcggtttcgttgaaggaaattgtttatttaaaatggattttttagttagtttttttcgttgtagggttgaaacgttttcggaatgggaagcgtttttgttggaaatggttggacgttgtagatttcgagttttggatggatgtgaaatatttttttaaggttaagttgttacgtttgcgagttgcgttttttttttttttttttttaattttttcgatgattggaattaaagtgtcggggttttatttggaaggatagagaattttgttcgtaaatgtatttcgtttttttttaaaattagggtgttgtggaaaagaaaggataatagaaacgtagacgcgatggatcgtgaatttttgtttttttttattttttttattttcgaataattagaaattaggaattagagatgtttaaagtttggttttttaacgcggcggtagggcgtattgggttggtgggggcggggtgaggggagaagggagagagcgtagaagcgcggcgggggttcgtttttgcgttttagtttttcgcgttggttcggtaggtttcgatgaggttttcgagggagtgtacgaagtcggatacgttgtagatgtcgtcgatgacgaagatggcgacgtcgaagaagatttggtgttatagtagtttgcgttagagtaggcgtaggtgaaagaggttgggtagtaagaaatagaggtcggcgttcgtgaggttgtcggtgaggtttatgagtagcgcgaagtgcggtatataaatggttatgagtagcgtgaagacgacgagcgcgtagcgtagcgttagtttttaggattttaggcgttcgtcgtcgttgtagtaggtcgggaaaaaggcgcggttgtttttttggaagagcgatttttttagtatttcgatagcggtaaagaatggtagaggataggataatagcgttttggttattagaaagatgttgattacggcgcggatggagtcgggtaggttattcgtgatgatttttttggtttcgtcggtttaggtgaggtaggcgacgagcgcgaagaggtttttgagtacgtaggttgcgatgtgcgtttagtttattatgtagtggaattcgttgggttgttgtatattgttttttagcgaaggtaggaagatttgagacgtgtagttgaatacgatgatgttaatggagatggggaattttttgacgtcgatgtagaatttgatttttttttaggtttagtcgcgcgttcgcgatagatagtaggttatgattaggatattgatgacgaagtgggttagagtgtatagtagattgaatttggatacggttttgaggtttttaaggaaggcgtaaggtagtagtacggtcgtggcgataatggattaggatttttgcgatacgggtagtttcgggaagttgttgtatatgaggttgttatttattattacgtataggatgtacgttattattagttcgatgatttgcgttacgtttattattcggtcgtttagcgttgggaagcgcggggcgtagtaggcgttggttatggttacgtacgagtttcgtacgcgtattatttcgtcgtttttatttttttcgtataggtacgcgatgaggattttgtcggtgtagtagtatataacggcggcgaagatgatgagaaataattttaggtagtcgtcgtgtaggatggcgtagggtaggtttagtacgaatatgttttgtggggcggagaggtaattagacgcggacgtttagcgaatttggtaacggatgaggggttcggggggcgtggtttaacgttgtggttcgaagggggcgttaaggatattgagaattgggtttgagtcgtcggggaggagaggttaagagtaggttgcggggtggatgtaggggaattaatagtgagttcgggtgtcgagttagagatggagagggagggatgtatggacggatttgagaaggaaaggtgcgttaatggttggtgatagcgagagggttagggtgggagagggttgagaatagggagaagttataggagggaagggagatatttcgggatggtttttggggataggaatagaatgaggagttgggggaggagatgagaagggatagaagggagcgtagtcggaaaggggttttaagaaaggtagtgagttgggtttgggttagtggaaagagtgggtacgggatttgtggtggggttggaatggggtacgggagttaaagaggaaaattcgggcgttttaggtttagattagaggaggaaacgttaaaggttgtagttgtgaggcgaaaaggaaatagggtagagagggagaggggttgaaggtggggtaaagtttttgggaggtaagaatagagataatgtgaagacgtttggggagtagcgcgcggggaggaggaagtagggttggaaattgagagttttaggataaggttggagttagagtgaggcgagggcgagatttaaggaaggggattaagtggaggttggggaggtaagtaggaggaggagtttggcgggaaggcgttagggaggttagaaagtcgaatcgagtaagagtttagaattagaagttttagggttaggcggatagggttgtagggtttagaatttatacggggattaagagttaacgaaatttagggtttcggaggtttacgagtttttagttttttgttttggttttttttggggtttattaaacggagttttgaaagacgtttcgggaagtcgcggggtatagcgaaggcgggagtagtttcgggttcgtgatttagtaaggtcgtttcgtcgggtttcggagcggaaagcgttttgggtcgggttatttggtgttcggggttcggtggagttttgtttatttcgatatatggaataatttttgggaggtttttgtttttagaaaatttgtttttcgtggttttagtgatagtgcgttttagggacgtcgcggggttaagttgtaagggatcggggttgtttagagttgaagtttttttcggtttagaaagttgcggtttgttagtttttgttagttcggaggtcgttgttaagattttaaatttgttttttatgtaggagttttgcgtcgtttggtggggagtggggggttaggaataaggggagagggtttagagagtaggggttatttttagtttttggagagggtttcgttagggttatacggggaggagttggtcgtttttttgcggtgtagtcgggatttcgggcgagaggggcgagtttgtgtataggtaatgttggattattgcggattaaatgtgtttgtgtgggagtatgtgtgtgttttcgtgtgtgtatatttgtatgtttttaatagggtcgtatttaagggagtaggttggtttttgtttgtatgtatttgtgtatgtgtgtgtgtatatgtttaaacgaatattcgtgtgtttggtatgtgtaggtatatgtttttgtttgtggagttgtaggggtgtacgtaggtgtatttggggatagtattgtggtttatatatagatatatgtcgtgtgcgtttgtgtttgcgtttttgttcgtgggaaggggggttgtgggtatgtggtgtgtttgtttatatacgtgtgcgtgtttatgcgtgtgtgcggggggaggagatttcgattttagcgattttttttttttttttttttttaaaaatgtagttgtgaattcgttttagagtttaagattaaatcgtgttttttaattttgatttttttttttttttatcgttttttgttttttttttttattttttttatttttgtagtgttttcggataggtgttttagatcgaattttagtttagcggttttgtagttggtgtcgttgggagggagcgtgggttagggcggaaaatatcgtttgggggcgtaggttttcgcgtagggttgggagggatggagaaagggagatttttgggtataggagggggtttttaggtcgagattatcgggcgattgtcgggggtagagttcggtacgttgagttgggaggggggaggataggtagaattgggaatttcgcgtttatttggatggcgttggttacgttttagtttgttttttacgtcgtgattttgggtttgtcgtggttttcgaattcgttattattttttatttggtttttggagtcggagggcggtagaggagtttcgttgtttcgttgataatggatgtttttttcgacgggcgttttagcgttttcgttttcgtagggttttttttcggtttttaggatgtttatttgtaggttttggcggtgtttaaagtcgaggtcgtcgtaatgcgcgaagtttatcgtttttttattcgtggtcgtttgaaaatttattttggcgaatatgtcgtttattttggtttgggatttgttggatacggacgtggttacgttggatagtttgttgcggagtaaggtggttatggcggcggtggggatagcggaaaggatagaaggattcgaggatgcggggaacgcgatgtaagaaggcgagggttggggggcgtaaagtcgttattttcgtttgtttttcgcgcggcgtttcggggttttttggtttatgattttcgtagttggcgttcgaggtttttttagggttggatcgggtaagttggtagtaggtttggcggagcggcggcggcggcggtggtggttagtgtattgcggagttgtcgcggggcgcgagttgggttgcggagggcggcggcggcggcggcggcggtagcggcgttagagtagttacgcgaagttggcgcggcgtttttattcgtgcgtagtttaatgcgttttcgtttttcggaattaggcggtgcgggggtgggggattggagagaggaaatattcggaggtaggggacgtgaggaaggggttaggagaagagaaagggggcgtcgagggatttagacgtgagttgggggtagaagaagggcgtttttgggaaggaggcgggagggagcgcgtgaaagagggagcgtcgagggtaggggaggtgggggggcgaagtgttgtatttttaggggaggtgttaagttcgtattttggttttttttatttcgtcgtcgtagggtgggagggggtcggcgtgggttgatgttcgtagttttttattttcggattattttttttagggttcgggagttgtgtagttttagattttttggttaaggattggtttgggcgtttcgaaagttcgtaggattgagttgttagtttttcgcggagcgggtcgtttataagttagtttttttggtatttatttttcgcgcgtaaattcggtcgcgagttttttttgaaggtagaagtggttggtatggatcgtttttaaggaagtttagttttaggtttagttattcgggtttttttcgttcgtttagggacgtcgcgagggaagcgattgtgcggatcgttcgttattagtcgttttttaaatgcgtgtagaatggaggcgaaaggttggttttttttttttttttcgtttgggggtttggaagaaggtaggattttatgaggatatttttcgttagttttttagcgggtttgcgaatgtttacgtcgagaggggcgtagacggggttaggcgcggaggaaagaagggttcgcggcgttgtaaggcggaggaagtagaggttcgcggtgcgttggggttttgtttcgacggt

SEQ ID NO: 324 - DNA, 3049 bp, Artificial Sequence
  Description of Artificial Sequence: Synthetic polynucleotide
tattcggtgtagttggtttagattttgttttcgttttggtcggtgttgttggtaaaggcgtaggtgttcgtggagttgtacgttattatgtggaagttcgattcggatagtttgtcgaaggtttgttttaggaagttgaatttgaggtaatagcgcgaggtgtagcgtttcgggggacggtcggggtttcggttttcgtttagggtgtttttaaatatttttttggttagcgacgttttttcgtaaacggtgatgcgcgttattcgtcggaatttggcgttcgtttgcgcgtttcgttcgatggtgtaggagtcgcggtagtcgatggtgatgtagttcgagcgtcggttgtcgtttagcgattgggacggcgtgagtagcgggttcgtcgcgttttcggacggattgcggttagttagttttagcgtgggcgacggcgtttcggtagaggcgtttttttgttgttcgggtttcgagtagttaagcggtagtagttcgttatttagcgagttttttttgtgtatttcgcgtcgcgagggcggcggtttcgggtcgggttgttggggcgtttcgaggcggcgtacgagttttggtagttcgaagtattcggtttcgcgttgtagtcggttgcgttcggggaagtagtcgggtagtacgagttgtaagtttcgtaggtaatttaggatgtagcggaagaggaagtcgtttcggtttagaaagaagcggtttttgttgtttcgggttagtttttgcggttgttgttgcgtgaatatgcgttagagtagcgagtcgggtatcgatattatcgtgtagcgtcgggttacgtatatttggttttttacgtttagttttacgatgtcggggaagagcggtggtttcgcggaggacgacgaggagttattgtcgttttcgtcgtcgttttcgttgggtaatttacgtgtgttgttcgttagagttatgatagagaggtggtcgggtcgggatagtggtaggaagtcgcgttgtatttaggagttgtaatcgtttttttcggagtttcggaattcggacgttcgtttagttttgcgtttcgtcgtcgtcgtcgtcgttatcgtcgttatcgttatcgtcgttattttttagagtcgcgcggagtcgagcggtgcgagcgcgtcgttgtgcgtttttttgagttttagtgcgtttcgttcgttttgttcgcgcgttttaggcgagtgtcgggtcgcggttcgcgcgttgtttaagtagagtcgtttgttttggtgtcgtggcgcgtaggaggcgtgggcggcggcggagtttcgtttatcgggcgaggggaggtggggagcggggattcgatttgtattttaaacgcggacgttacgcggggttgttggttttatttcggttcgcgagcgttgggggcgttcggatttttattcgttttttatttattagtttcgtttcgtggtttcgtttaattttttttttttttcgaagaggattcgttcgagatttggcggtttcggaagatagttttttggagggatagttatcgcgtttttttttttttcgttttagttcgtatttaaggattttggaaggaggacgtgaattttcggaagtttgtcgtttcgggagtggaaatgcgtggtcgttttcggttttttcgtttgcggaattgggcgtttttagtagtgtagttgcggtttgttatcgttggttgtcgtgttattgaaagtagagagacgcgaaaaatttggagagacgaaagagtcgttttagttcgagcgagttagattttgtttaagttgttttgtagttagtttggaaaataaataaataaatttagaaataaaaagtaaattttagtgtttcgtagtaggatgttttacgatagtttattttttggttgtagagataaaatgagatgaagttttaaatttgtttttaattgtaatttttttttttcgtagggttttcgaggtattttatttcgaagtgaaggggtaagatttcggaacgttcggttttcgggttttatttagttttcgttgaatcgcgtttttagatttataatagttgtagatttaacgtaatttttaaagttatttttggcgtttgtatgtttatttttttaaaagtttaggcgttttttttttttcgtatgtttcggttatttttcggttttgtttaagttttcgttagttttagaaagggatatttatatatttgaaggtttttgtttggattttattttttaatttttgttgtttatacgtttgtttttttttttcggattgtagtttatagaatcgttttttttttttggaagttttttttggttttttaggtgggtggggtttttggatggttttttatatattgtttgcgttgtttttagtacgttttgaaatgttatatttatgagtgattatttgattattgatttgggtatgaaaataagtaagagtttttgaatgttgtaaaaagagaagagtgtagaggagggtgttaagaaatgattgggttattgaatgttttttgtgtatttgttattatttgtagggtattagggagtgaggaatgtaaaggcgaataatttttaaagcgtttttagtgtagtttaataagtaaagggttaggggtttgcgtagttattatattagtttgaagtatagattatatattaggataaattaggtaagatttttgtttttgataaaatttatttttttgtgtaattatttagtgagttttatagtttttttatagataaatgttatttttattttgaaatgtttatatttgtttaataattatcgcgtttatgttagtgtgttgaaatgagattaatttttaaattagttattttaattgtaagtatagattttgatattgaatgtattttaatattttttttttgttgttgttttgttttttgggataaataatagataatataaaatttttaagttttagtgtaggatttcgaggtggttgtgttattaggcgttatattagtgttagagatttgataaaattagttttttttttataaatttaa

SEQ ID NO: 325 - DNA, 3049 bp, Artificial Sequence
  Description of Artificial Sequence: Synthetic polynucleotide
ttggatttgtagaaaagaggttggttttgttaggtttttgatattaatataacgtttagtagtataattatttcgaaattttgtattgggatttggaagttttgtgttatttattatttattttaaagaatagaataataataaaaaaagaatgttgaaatatatttagtattaaaatttgtatttgtaattaagataattggtttgggggttgattttattttagtatattgatatgagcgcggtaattgttgagtagatataaatattttaaaataaaaatgatatttatttgtgaggagattgtgaagtttattgggtagttatatagaaggataaattttattaagaataaagattttgtttgatttattttgatgtgtggtttatattttaaattgatgtgataattgcgtagatttttgattttttgtttattgggttatattgaaagcgttttggagattattcgtttttgtattttttattttttggtgttttgtaaataatagtaggtatataagaaatatttagtgatttaattattttttgatatttttttttgtatttttttttttttgtagtatttaggagtttttatttatttttatatttaaattagtgattagataattatttataaatatgatattttagaacgtgttgggagtagcgtagatagtgtgtagggagttatttagaggttttatttatttgggaagttagggaaagtttttagggggagggggcggttttgtgggttgtagttcgagggggaaaagtaaacgtgtaggtagtaggagttgagagatgggatttagataagggtttttagatatataaatatttttttttgagattgacgggaatttggatagggtcgaagagtgatcgaggtatgcgggagagaaggggcgtttggatttttggaaggataaatatgtaggcgttaaaggtggttttaaaaattacgttagatttgtaattgttgtgagtttaagggcgcgatttaacgaaggttgaatgggattcggagatcgaacgtttcggagttttatttttttatttcgaagtgaagtgtttcgaaggttttgcgggaagagggaattgtaattaagagtagatttgaagttttattttattttgtttttgtagttagaaaataaattatcgtaaagtattttattgcgggatattgaggtttgttttttgtttttaggtttatttatttattttttaggttggttgtaaggtaatttgaataaaatttggttcgttcggattggggcggttttttcgtttttttaggtttttcgcgtttttttatttttagtgatacgataattaacgatggtaggtcgtagttgtattgttggaagcgtttagtttcgtaggcgggagggtcggaggcggttacgtatttttattttcggggcgataggttttcgaaagtttacgttttttttttagagtttttgggtgcgggttggggcgagaggggagggggcgcggtgattgtttttttaaggagttgtttttcgaagtcgttaagtttcgggcgggtttttttcggaagagggagaaagttgggcgggattacggggcggggttggtgggtggggagcgggtgggagttcgggcgtttttagcgttcgcgagtcggggtggagttagtagtttcgcgtggcgttcgcgtttaagatgtaaatcgagttttcgttttttattttttttcgttcggtaagcgaggtttcgtcgtcgtttacgttttttgcgcgttacggtattagagtaggcggttttatttaagtagcgcgcgggtcgcgattcggtattcgtttggagcgcgcgggtaaggcgggcggagcgtattggaatttaagggggcgtatagcggcgcgttcgtatcgttcggtttcgcgcggttttaggaggtggcggcggtggcggtggcggcggtggcggcggcggcggcggcggggcgtagggttgagcgagcgttcgggtttcggggtttcggggaaggcggttgtagtttttgagtgtagcgcggttttttgttattgtttcggttcggttatttttttgttatggttttggcggatagtatacgtggattatttaacgggggcggcggcgggggcggtagtggtttttcgtcgtttttcgcggagttatcgttttttttcgatatcgtggagttgaacgtggggggttaggtgtacgtgattcggcgttgtacggtggtgtcggtgttcgattcgttgttttggcgtatgtttacgtagtagtagtcgtaggagttggttcgggatagtaaaggtcgtttttttttggatcgggacggttttttttttcgttatattttggattatttgcgggatttgtagttcgtgttgttcgattattttttcgagcgtagtcggttgtagcgcgaggtcgagtatttcgagttgttagagttcgtgcgtcgtttcggggcgttttagtagttcggttcggggtcgtcgttttcgcggcgcggggtgtataaggagggttcgttgggtgacgagttgttgtcgtttggttattcggagttcgaatagtaggagggcgtttttgtcggggcgtcgtcgtttacgttggagttggttagtcgtagttcgttcgggggcgcggcgggttcgttgtttacgtcgttttagtcgttggacggtagtcggcgttcgggttatattattatcggttatcgcggtttttatattatcgggcgggacgcgtaggcggacgttaagtttcggcgagtggcgcgtattatcgtttgcggaaagacgtcgttggttaaggaggtgtttggggatattttgaacgaaagtcgggatttcgatcgtttttcggagcgttatatttcgcgttattattttaagtttaattttttggagtaggttttcgataagttgttcgagtcgggtttttatatggtggcgtgtagttttacgggtatttgcgtttttgttagtagtatcgattagagcgaggataagatttggattagttatatcgagta

SEQ ID NO: 326 - DNA, 4721 bp, Artificial Sequence
  Description of Artificial Sequence: Synthetic polynucleotide
acgtgaagtttagtatttttttaagtttttgtttatatataaaaagttacgttttagaggttttatttttaatttaagataagtaggatattttaaaaattatttatttattagttggtttgagaaaatttatcgggtatttggagtaaggaggggggggagattttgaaattaaaaaagtaagagaaaataaaggtttagttatgagaagagagatagaaatttatgataatagaggtatttttttagtttaattgtttgttttagttgtgggggttggaggtagggttcgaggcggtgattgttttgatatttagttgttagataaataaaagaggtcgtttggcgttagtttcggcgtttcgtttttttacgtttgcggtcgtagtcgtcgcgttcggttggttcggttggaaattatcggttcggtcggagtcgcgtattttatagtttatagggcggggggcgattatgtttttttttcgttttcggattttagatttagtttttagtaatttcggtttttcgtttcggttcgttttttaggcgtgtaatttatttttgttttcgtcggttcgttcggtattcgcgcgggggatacggggttgtttatttttagcgtattcgggagatgtattttaagcgtgttggggaacgtgggggatttgcgggcgttcggggtgaatttttatattatattttgtgtatagagacgtagagtaaaggaaggaatggagaaagttgagaggataaaaggaaaggagttttagggttttagtcgagaagtttaggttttagcgtagtaagaggcgataacgttattgaggcgtcggggttttattaatttatagatttatttgtgcggaaggaaggaaaaagtaggggatatttaattttttttgtttgtttgtttttttgtattttggggttggtagagttgaaaggagatagatatttagttcggttttttatttaattttttttgttttaaaattttaaaggtgcgcggttacgatagtatttgggttattggtgttcgacgtgatttttcgtatttattaaaggagtaaatacggagattttttagtttttatagtacgttttttttagttttttttggcgggtttggattaaatttaattcggttatatattttaacgttttttcgggtgcggggaggcgtgatttttttatttttttttgtatttttttgttgattcggaaatgaaggcgtttaatttttaatcgtagattgtaggagtagtgttcgtagattttttcggggtaatataggagaaaatttggaagggaatttttagggaatgttttttgagtttttttttgttttttttttatttttagtttttagtttttttttaggagggtatgtatatttttttaggagggtatgtatatttttttaggagggtatgtatattttttttggagggatggttgtataaacgtattgttttaggggttttttttttagtattggcgtttcggaaaatgttgggggtagggggataattttttatttagttcgtagagtcggttaaggtgatgggggttgtagtatattagttcggggttgattttttcgtaagatttatagtaatatagttttttgattttcgaggaatgtttgagattcggttatttgaatattttgtatagtaggagggggagcgagtaggacgagggcggttgcgtaggttgcgcgtcggcgggcgttttcgggtttagtttgtagtttaggcggtcgggtagtaggaggtacgcggtgcgcgtttcgtcgcgggattttacggtttggagtagtagttttagttgtcgtttttttagttttttgagtatcgagtgcgtgagcgtttttagattcgtttcggcgttttcggtcgcgtcggcgttcgcggttggcgggtggggatggtggtgatttttggtatttcgtatcgttttgtttaggtagtatttagttttgttcgggtcgtcgttatcggttttatgcgttcggttgttcgtcgtttttttttttcgtagttcgtttttttttttatttttttttgcgttttttttttcgttttcgtcgtcgggcgtacggtttttttagagacgtcggacgagcgtagatcgtttggttttgaatatgcggggcgaggaggcgaggagaaaagtcgtttgtttgttaaggagcgaatatgattttcgtatattatgaagaagtcgggcgtcgagttggggtagtaggcgtaggcgatagtagtagtagtaggggttcgggtaggagcggcggcggttcgaggggcgtttcgtggtatgcgttagtttttcggaggtcggggcgcgcgcgggggttcgggggcgttcgtcggggatcgggggtttgcgtttcggttgttttatttcgcgcggttcgcgttttgcgcggtttttcggtttcggcgcgtttcggaggaattcggtcgtcgtttttttggggacggtcgagtttgttttcgtcggcgtttttttaaaaagaggttttttcgtagtggttttcgaatgtcgggttcgttagtttcggttttttatatggaaggttcgcgggggtaaaaaacgaaaggcgttcggttgggttgttggaagaaggaaaaagttttttttttttttgttaagtaatttaatttgggggtggggagaagtaggtaattaaaaaaaaaaaagtaagcgatttattttttttttttatatttttagtaatcggattttttcgaatttcgcgtatacgaagatttaggggagggggtcgagtggattttatttcgtatgagacgtttggtaaaataagaaggttttcgtaaaatttaataattaaatatgtaaagttttaaatgaaaattattattttttcgaattttagaggtttgggggcgttcggttggaattggggtttaaaaaaagaaaatgtttataaagtataataagatgtttgatgggtggaaaaatgtatttacgagttatattttttcgtttttttgtaaagtttcgttggttttttttttttttttttttgttaaaaaaaaaaaaaaaaatcgtgtatttttttaatttatagaaagttttggttagatcgttttaattttgcgtatttgggtggtttaggggagtttttggtttttttttttgcgtttttgggggtttaggttttcggcggggattttttcgaggttggcgcgggcgtaggggtagaagatgttgcggcggcggttgagttcggcggggttgatagcgcgggggagggtggcgcggcggcggcggagggttttagacgggtcgcgcgttttcgtttttttcgggtataagttgtttgttagtgtaggggtcgtcgatgtttttttttttggtcgcggttggtcgtcgaggtttttcgtatgggttgttcgtttcgatttagttgcggcggtaggaggtttcggtgttttttcggcgttttttttttcgagatttttttcgtcgcgttcgggagtttttttgttttcggttcgtttttttttggcgtttcggtttttttgtcgtcgttaggggttcgtcgcgtcgtatttaggggtttaggggtcgggcgttcggcggttcggcgtcgacggattggttttgtttcgggtagttttttttcgcgcggcgagcggatcgagtacggcgttcggttggttcggttggcgcggttcggggataggatttttcgtgcgtcgagtagtaagcgagtgtgttcggggtttatcgtttttcgtaaggtttttcgttttcgttttttttttttttttttttttttttttttttttttcgtttttagtcgtcgtagtcgcgtcgtttttttttcgttttttcgtatttttttttcggttttttgttcggttggttttattgcgtagtggcgcgttcggtttcggtttcgttacgtggtcgtttagatattttgtcgttttaaaaaaaaaaaaaaagcgattgtgtttcgtaaataatagatcgggtttttaaaagttatttttttttttaatttttcgttatcgttattttttttcgggtttgtagagggggtatcgatggaggggagagagataggtggggggtagagaagtttttagaatggattgagtttcggtcggagttatggagaaattggaaaagtagggagtatcgagcgggtttcgtcgcgagttttggagttgagcgagcgggtcggtggttcgatttcgattcggttgggtttcgcggtggttatttcgcgcgcgttcgttttagcgttttatttattggttttgttttaaaggttttggcggtggattttttggtcgcgttcgagggtaaggggaggagagcgttgtttcggtttaaaagatatttatatcggattggatcgaggttttgggaagtgtgcgttgaggggaatagtcgtcgagggcggggaggcggcgtgaatatgattttagcggcggtcgcgcgttttttttcgtttttttagtttcgggtttcggtttttaggattgtttggagaagtgtgttttgtgtatagttttggaatgtatttggtcggttgacgagttgtgaggggtagtatttcggcgggagaaggggagcgggggtgggggttcgtttgcgcgtcgcgggtaggttttttttcgggttcggaagattttcgttattcgttattttgtttttcggcgcgggaaggttatttagcg

SEQ ID NO: 327 - DNA, 4721 bp, Artificial Sequence
  Description of Artificial Sequence: Synthetic polynucleotide
cgttgggtaattttttcgcgtcgggaggtagggtggcgggtggcggaggtttttcgggttcgggaggaaatttgttcgcggcgcgtaggcgagtttttattttcgttttttttttttcgtcgggatgttgttttttatagttcgttagtcggttaaatgtattttagagttgtgtataagatatatttttttaggtagttttagaaatcggagttcggagttgagagggcgggagggagcgcgcggtcgtcgttgaggttatatttacgtcgttttttcgttttcggcggttgttttttttagcgtatattttttagggtttcggtttagttcggtataaatgttttttaaatcgagatagcgtttttttttttttgttttcgggcgcggttaagggatttatcgttagggtttttaaaataaaattaatgaatgaagcgttagggcgagcgcgcgcgagatggttatcgcgaaatttagtcgggtcgaaatcgggttatcgattcgttcgtttagttttaaaattcgcggcgaagttcgttcggtgttttttgtttttttaatttttttatggtttcggtcggggtttaatttattttgggagtttttttgttttttatttattttttttttttttatcggtattttttttatagattcgggagggggtggcggtggcggggggttggggggagaaatagtttttagaaattcgatttgttgtttgcgaaatataatcgttttttttttttttttaaagcgatagggtgtttagacggttacgtgacgaggtcggagtcgggcgcgttattgcgtagtggaattagtcgagtagagggtcggagggggggtgcgggggggcggggaggaggcggcgcggttgcggcggttgggggcgggggagggaagggggaggaagggggagggaagggggcgggggcgggaggttttgcgggaggcggtgagtttcgggtatattcgtttgttgttcggcgtacggaagattttgttttcgagtcgcgttagtcgagttagtcgggcgtcgtgttcggttcgttcgtcgcgcgggagagagttgttcgagatagagttagttcgtcggcgtcgagtcgtcgagcgttcggtttttgagtttttgagtgcggcgcggcgagtttttggcggcggtagaaggatcggagcgttaggagagggcggatcggggataaggaggttttcgggcgcgacgaggagagtttcggaggaggaggcgtcgagaggatatcggggttttttgtcgtcgtagttgggtcgaggcgagtagtttatgcggggagtttcggcggttagtcgcggttaggggaagggatatcggcggtttttgtattagtaagtagtttgtgttcggggggggcgagaacgcgcgattcgtttggggtttttcgtcgtcgtcgcgttattttttttcgcgttgttagtttcgtcgggtttagtcgtcgtcgtagtattttttgtttttgcgttcgcgttagtttcgaggaagttttcgtcgaggatttgggtttttaggagcgtagggggaaagattagagatttttttaaattatttagatgcgtaggattgaagcggtttagttaaagttttttgtggattaaaaaaatatacgatttttttttttttttttggtagaagaaaaggagaggaagattagcggggttttgtaaggaaacggggggatgtaattcgtggatatatttttttatttattaaatattttgttatattttgtaaatattttttttttttaaattttagttttagtcggacgtttttagatttttgaggttcgaggaggtggtggtttttatttggggttttgtatatttggttgttaggttttgcgagagtttttttattttgttagacgttttatgcggggtgaagtttattcggtttttttttttgagttttcgtgtgcgcggaattcgaggagattcggttattaaggatatagaggaaaaaaataaatcgtttgtttttttttttttaattgtttgtttttttttatttttaaattaagttgtttagtaagggggaaagaggtttttttttttttttaatagtttagtcgaacgtttttcgttttttgttttcgcggattttttatgtaggaagtcgaggttggcgagttcgatattcgggagttattgcgggggggtttttttttggggaggcgtcgacgggggtaggttcggtcgtttttagggaagcggcggtcgggttttttcggggcgcgtcggggtcggagagtcgcgtagggcgcgggtcgcgcggggtggggtagtcggagcgtaggttttcgattttcggcgggcgttttcgggttttcgcgcgcgtttcggttttcgggagattggcgtatgttacggagcgtttttcgggtcgtcgtcgtttttgttcgggtttttgttgttgttgttgtcgtttgcgtttgttgttttaattcggcgttcgatttttttatggtgtgcggaggttatgttcgttttttagtaggtaaacgattttttttttcgttttttcgtttcgtatgtttaggattaaacgatttgcgttcgttcggcgtttttggaggagtcgtgcgttcggcggcgaggacgaggaggagggcgtagggggaggtggaggaggaggcgagttgcggggagaaggggcgacggatagtcgagcgtatggggtcggtggcggcggttcgggtagggttggatgttgtttgggtaaggcggtgcgaggtgttaaaggttattattatttttattcgttagtcgcgggcgtcggcgcggtcgggggcgtcgaggcggatttgaaggcgtttacgtattcggtgtttaagaaattgaaggagcggtagttggagttgttgttttaggtcgtggagtttcgcggcgggacgcgtatcgcgtgttttttgttgttcggtcgtttggattgtaggttgggttcgggggcgttcgtcggcgcgtagtttgcgtagtcgttttcgttttattcgtttttttttttgttgtgtaaagtgtttaggtggtcggattttaggtatttttcggaagttaagaggttgtgttgttgtgaattttacgggaagattaatttcgagttggtgtgttgtaatttttattattttagtcgattttgcgaattaggtgagaagttgtttttttatttttaatatttttcggagcgttagtgttggaagaaaagtttttagggtagtgcgtttgtgtagttatttttttagggggagtgtgtatatttttttgggagagtgtgtatatttttttgggagagtgtgtatatttttttgggaagagattgggggttgaaagtagagaagggataaggggaaatttaaagggtattttttgggggtttttttttaggtttttttttgtgttgtttcgaaggggtttacgggtattgtttttgtagtttgcggttaaaaattagacgtttttattttcggattaataagggggtgtagagggaggtgggggggttacgttttttcgtattcggaaagacgttgaggtgtgtggtcgagttggatttggtttaggttcgttaaggaaggttgggagaggcgtgttataaaggttggaaggttttcgtatttatttttttagtaaatacggagaattacgtcgaatattagtggtttagatattgtcgtggtcgcgtatttttggagttttggggtaaagagagttggatggaaggtcgaattgggtatttgtttttttttaattttgttagttttagggtgtagaggaataaataggtaggagaagttgggtgttttttatttttttttttttttcgtatagataagtttgtagattagtggggtttcggcgttttagtgacgttgtcgttttttattgcgttggggtttgggtttttcggttgagattttgaaatttttttttttttatttttttagttttttttatttttttttttattttacgtttttgtatatagagtgtgatgtgagggtttatttcgggcgttcgtagattttttacgttttttagtacgtttgggatgtatttttcgagtgcgttaggaatgggtagtttcgtgtttttcgcgcgagtgtcgagcggatcggcgggggtagaggtgaattgtacgtttggggggcgggtcggggcggggagtcgaggttgttgggagttgggtttggagttcgaggacggggagggggtatggtcgtttttcgttttgtgaattgtgaagtgcgcggtttcggtcgagtcggtggtttttagtcgggttagtcgagcgcggcggttgcggtcgtagacgtggaggagcggagcgtcgaggttggcgttaggcggttttttttgtttatttgatagttaaatattaaggtaattatcgtttcgggttttgtttttaatttttatagttaagataaatagttgggttaaaagaatgtttttgttattataagtttttatttttttttttatggttgggtttttatttttttttgtttttttaattttagagttttttttttttttttattttagatattcgatggatttttttaaattaattggtgagtagatgatttttaaaatattttgtttattttaagttagaaatagagtttttagaacgtggttttttgtgtgtaggtaaaggtttggggaggtgttgggttttacgt

SEQ ID NO: 328 - DNA, 2146 bp, Artificial Sequence
  Description of Artificial Sequence: Synthetic polynucleotide
aggtttgtgtattcgggtagtttttggttgttgttgttaggttgttttagtcggtcgttgttgtcgcggcgattggcgataagttattagttatttacgatggtttaaggaggcgaagaagagtaagcgattaggatattaaaacggttatcggaggtaggtttttagtatattagtcggtcgagggtcgagtttcgcgggcggtagtaagttttgggagttggaggtaatcgaattaaaaggcgttttagaaatttcgtttcgggattttgtttagtagggtttcgggttggagggcgtcgaggtttggcggacgggatagtgggaagagagaaaggtgttaaggggatttaagatttgggatttagaataagagggggtggggaataattttattaagttaaatagatttattttttttgtttttatgttggaaaaatttaggttttatatggtttttcgggagggagggagggagacggtggttgtcggtttttttttagggtttcgttggagaagggagatgagtttttcgtaagaattttattttgttaagtatattttagggagagttaggagagtaataatagttggggaagtttcgagagaggggataggttattttttaggatttaaaaaaattaatgggagaaagaaaaataataagaaaggaagatagagaaaggttgagatttttttagtagtcgcggagaaaatttagttttggatttggttgttgaaagaaaagagagagaggagaaaagaggagagaagtaggaagatagaggggagagagagagggagagagagagagagagagagagggagagagagggagggagggagggagggagagagagagtcgttgcgtggaaggaagtttaaagtttgtgaattttttttgaatcgagattggagttatatgggttataaattattgagatatatttttcgttatttataaattgatagtttattttagtttagtttattttagttatcgacgaggggagaataggtagatataatatatatttatatcgagttttagagcgagcggtaggcgataaattttttttttttgaaggtaaaggaaaaaaagattattgtttaaagttgcgtcgtttttcgttttttcgttttcgtttcgtaaagttatttcggttggggagttcgaggggtagatcggttagaggagtcgcgcggcgttcgttttaatttattcggtttaggagtaggggtgcgtaggagggagggggtgggggagcgggaaaaaaaatagaagatcgaaaggtgtcgggcggtttagttcgttagaatttagtttcgggttttagtagggttaagtcgttatagtgtggttgttttataagattggtacgttttatttttcgtaataatggtttttgtttttgtatagggaaaaaaaattatatagatatatatatatatttatttatatataagtttatatttttttatttttttttttttagtaagtttagatgtttgataaggagggaaggtgatggtggtgatggggaaggggggaaattttaaaatattcgtttttttaaaaaaagagtaagaagaaaagaaggagggtttttttttttttttttaaagaataggtaaaaatttaaatttagattggagggatagggaggaagaggtgagtaaaggtaaggaagggcggtgaagtttatagttttttttatattttattagtgaattattatgttaatatgagaagtagtatttggaggttgagttaaaggtaggtttggttcgggggtgagggtgtcgggtgtttttttgtatttattcgtaattggaatattaggatttttttagaaagtagttttgggtttttaatttttatattttggttttttttttttgagtttttagtttcggttttttttttttattatattttttttattttttttaaatttttttttagtttttaggtttagtttttaattaagggagagggaaagattagaatttaaaaaaaaaataaaaaaaaaatatttttttttttttttttttttgagaatagataataagcggtgagtgatgattttaaaaattttgaatattttgtagggggaggagggttgagaaaagggtgataaaagga

SEQ ID NO: 329 - DNA, 2146 bp, Artificial Sequence
  Description of Artificial Sequence: Synthetic polynucleotide
tttttttgttattttttttttaatttttttttttttgtaagatgtttagagtttttaaaattattatttatcgtttgttgtttgtttttaaaaagaaaaagggggaggggtgttttttttttgttttttttttaagttttggttttttttttttttttggttagagattgggtttggagattggagggagatttgggaggaatagagagggtgtagtggagggaagaagtcggggttggagatttagaaggagggagttagagtgtgagggttggagatttagaattattttttaaaaaagttttggtgttttaattgcgaatgagtgtagaggggtattcggtatttttattttcgggttaggtttgtttttgatttagtttttaaatattattttttatattagtataatagtttattagtggggtatggggggagttgtgaattttatcgtttttttttgtttttgtttatttttttttttttgtttttttaatttagatttaaatttttatttgttttttaaggaaaaaaaaaaaaatttttttttttttttttttattttttttttggggaggcgggtattttaaaatttttttttttttttattattattattattttttttttttattaggtatttaagtttgttaaagggggagaggtgggggggtgtgagtttgtgtgtgagtgagtgtgtgtgtgtgtttgtgtggttttttttttttgtgtaaaagtagaggttattgttacggagagtagggcgtattagttttatagggtaattatattgtggcggtttagttttgttggagttcggagttggattttggcgagttgagtcgttcggtatttttcggttttttattttttttttcgtttttttatttttttttttttgcgtatttttgtttttaagtcgagtgaattgaagcggacgtcgcgcggtttttttggtcggtttgtttttcgggttttttagtcggggtggttttgcggggcgggggcgggggggcggggggcgacgtagttttaaatagtggttttttttttttttgtttttaaggaggggagatttgtcgtttgtcgttcgttttggggttcgatgtgaatatatattatgtttgtttgtttttttttcgtcggtggttaaggtaagttggattgaaataggttattagtttgtgaatggcggagagtatgttttaatgatttatggtttatatgattttaatttcggtttaagaagagtttataagttttaagtttttttttacgtagcgatttttttttttttttttttttttttttttttttttttttttttttttttttttttttttttttttttttttttttttttgtttttttgttttttttttttttttttttttttttttttttttttagtagttagatttagggttgaatttttttcgcggttgttaagaaagttttaatttttttttgttttttttttttgttattttttttttttttattaatttttttaagttttggaagatggtttattttttttttcggggtttttttagttattgttatttttttggttttttttggggtgtgtttggtaaggtggggtttttgcggggggtttattttttttttttagcgagattttggggggaagtcggtagttatcgtttttttttttttttttcgaggagttatatggaatttgaatttttttaatatggaggtaagggaaatagatttgtttggtttggtagagttgttttttatttttttttgttttggattttagattttgggtttttttagtatttttttttttttttattgtttcgttcgttaggtttcggcgttttttaattcggagttttgttgagtaaagtttcgaagcggagtttttaaggcgttttttaattcggttatttttagtttttaaaatttgttgtcgttcgcggggttcggttttcggtcggttggtgtgttgggaatttgttttcgataatcgttttggtgttttgatcgtttgttttttttcgtttttttgggttatcgtaggtggttggtagtttgtcgttagtcgtcgcggtagtagcgatcggttgaggtagtttggtagtagtagttagggattattcgggtgtataaattt

SEQ ID NO: 330 - DNA, 2427 bp, Artificial Sequence
  Description of Artificial Sequence: Synthetic polynucleotide
ttttttggggtttgggtggggagttttttttagtaataaatatgagagggatagagaatgttagagagttttttgttgggattgggatggttggagggtattatagtattggtttcgaatattgaacggagaattgttatgtaataagaatttgggtatattagatttttgtaggtattttcgggatttatagatcgtatattcgatgggcgttcgtaggacgtgaatggtatttcggtaacgttaagttttattttagagttatagggtgttttttattaggttacggagttttttgggttatattgtttagggatattttgtaggggaggaaattgttttttttttttttttatgatttttgtatgaattttaattaagaaatattatatttagaattatagtatttatagtgatagtttttagaagattgtaatagtttttttgttatttaaggggtatagacggtgtagttgtttatttgaatgattttttaaatgagtgattattattattttaatttttttagttgtagttttgttataggttattgattataagtgttggtaaagaaattgtttttttaagtattttggcgttttttggagtgacggttatttttagtagttaaattgtattatatttttattttaattttgtgattgttttagtatttttaaaaatataaatcgattttttaggaaaaaataaaaaaacgaaaaaattttttattttttttaaatttttggtttaggtttatttgattttttgtaagttgttttttagggtaggttttagttttatttgttgcgtttgtttttttattttattttagttgagtaggtagagtttgtttttggaaacggttcggttatttgggagggaataaataggtattgtttagattcggagttgtaggtagggtttagtaggattttaggcgggtatataggggtttatttggagggatttgaggggtataggttatagtcgggagagtttcgggtaggtatataggggtttatttggagggatttgaggggtataggttatagttaggagagtatagataagaggttttcgaggttattagggtcgatttttattttattttaaggattagggacgtaaaaggattttaataaagacggttatattatttgttgtagaatgagtataaatgttttttttagttttcgaggtcggtattggtttcgttgatttttttaattttgttatttgtgtagtaggcggtaatagggataggtagacgatatagttggggttagaggacgacgtagagagatttatattagagattttcggggagtgatagagttttcgttttaattttagtgagtgggataggttgagtggggattgagtacgtttagggttagagtgggagggttagtcgtgtcggtttttaaagaggatttcgggaaataaatatttttttattcggtaaggataaattaagtaattgtcgagataggtgttcgcgttttaatttaaggttgtttagatagataagcgtttatcgtcgtattgttttaatagttgttgagatatatttttgtagtcgttttagttagagttagggaggttttgggagaatggttttgtttgtttttagtttttttttatttttaggagtttttttttttttttattttaattgatattttcgggttttttatttgtttagagtttgtttagtggggtatttaacggtggataggtgagagaggtgaggggttgggttgttatcgcggttaagggagttatggttttttagtttgaacggtttttgttcgaaattaggatataaatatagtattatatatagtagaaatagtttagaaaggttttagtttagatggtattggaataaatagttttttttaagttattttaaaatgaaagttttgggttatttatttttaaagaggattttaggatagttttaggagtttttttatgatatattttatggagaatgtttggttgttgcgtttatttaatgtagttattgaatagaaatttaagagcgttgttttgttagtttgaaattttttttatgtttttagttattagggttttagttaggttagaaataatagaggtagtaggtttttttagaatagtagtgtgaggttttttatagattttttttagtaatattattgttagtggtgaatattataaatagtatttatttaaagtttttaacgtgttttagggatatacggcgaatggagaaacgtttatttaagaaaattatttaagtggtagtaggaatagtaatttcgtgatatttgggttataatttgtttttttatttttatgtgataaaagttttatttttagtaggtaatcgagaagataggtttttttttttttagtgttattgtagtagtggcgggt

SEQ ID NO: 331 - DNA, 2427 bp, Artificial Sequence
  Description of Artificial Sequence: Synthetic polynucleotide
gttcgttattgttgtagtggtattgggggagagggagtttgttttttcggttgtttgttgggagtagagtttttgttatatggggatggggaagtaggttgtggtttaagtgttacgaagttgttgtttttgttgttatttaggtggtttttttggataagcgtttttttattcgtcgtgtgtttttaagatacgttagggattttaagtgggtgttgtttgtaatgtttattattggtagtgatgttgttggagagggtttgtggagagttttatattgttgttttggaagagtttattgtttttgttgtttttgatttggttgaaattttgatggttggaagtatgaagaaggttttaggttggtagagtaacgtttttgagtttttgtttaatggttatattgagtaaacgtagtagttaagtattttttatggggtgtgttatggaggaatttttggaattgttttgaagttttttttagaagtaggtagtttaaaatttttattttaaagtgatttggggaaaattgtttattttagtgttatttgggttggggtttttttgggttgtttttgttgtgtatgatgttgtgtttgtgttttgatttcgggtagaagtcgtttaggttggagggttatggtttttttggtcgcggtgatagtttagttttttattttttttatttgtttatcgttgggtgttttattgagtagattttgagtaaatgaggggttcggagatgttagttagggtaaaggggggaaaaggtttttgaagatgagaggaggttgagagtaggtaaggttatttttttagggtttttttggttttagttgaggcggttgtaggaatgtgttttagtagttgttagggtagtgcggcggtgagcgtttgtttgtttgggtagttttgggttgggacgcggatatttgtttcggtagttgtttgatttgtttttgtcgagtgggagggtgtttgtttttcggggttttttttggaagtcggtacggttggtttttttattttggttttagacgtgtttagtttttatttagtttgttttatttattggggttggggcgggggttttgttatttttcgagggtttttgatgtgggtttttttgcgtcgttttttggttttagttgtgtcgtttgtttgtttttgttgtcgtttgttgtataggtggtaggattagaggggttagcgaggttagtgtcggtttcgaaggttaagaagggtatttatatttattttgtagtaggtggtgtggtcgtttttgttaaaatttttttgcgtttttgatttttaggataaagtaaaagtcggttttggtggtttcgggggttttttgtttgtgtttttttgattgtagtttgtgttttttaggtttttttagatgagtttttgtgtgtttgttcggggttttttcgattgtagtttgtgttttttaggtttttttagatgagtttttgtgtgttcgtttggggttttgttgagttttgtttgtagtttcgggtttgggtagtgtttgtttgtttttttttaggtggtcgggtcgtttttaaggataggttttgtttgtttagttggagtggggtggagaagtagacgtagtaggtagggttgggatttgttttgaagggtagtttgtaggaggttaggtgagtttggattagggatttgaaggaagtgagaagttttttcgtttttttgtttttttttggagagtcgatttgtatttttaaaaatattgaaatagttatagagttaaagtgggagtatgatatagtttagttgttgggaatggtcgttattttagggagcgttaaagtgtttaaaagaatagtttttttgttaatatttgtggttagtaatttgtaatagagttataattaggaaaattagagtggtggtagttatttatttaagaagttatttaggtaagtagttgtatcgtttgtattttttaagtagtaaagaagttgttatagttttttgaaaattattattgtgagtgttataattttgaatgtaatgttttttaattagaatttatataagaattatgaaaaaaaaaaaagagtaatttttttttttgtagaatgtttttgagtagtgtggtttaggaggtttcgtagtttggtgaaaggtattttgtggttttggggtggagtttggcgttatcgagatgttatttacgttttgcgagcgtttatcgagtgtgcgatttgtgggtttcgagggtgtttgtaggggtttgatgtgtttaggtttttgttgtatggtagtttttcgtttagtgttcgaaattagtgttgtgatgttttttagttattttagttttaataggaagttttttggtattttttgttttttttatgtttattattggaaagggttttttatttagattttaggaaa

SEQ ID NO: 332 - DNA, 3015 bp, Artificial Sequence
  Description of Artificial Sequence: Synthetic polynucleotide
tttttttttttttttggtagaattgttcgatggttttgattatgtttaggtttatttcgatgtagtagtaggtatggtcggttcggggttcgggatagttcgttacgtagtagtaatagttttttagggtgttgatttttttatatttggtttttttatataggcggtcgaagcgatcgaatagatcgtttaggagatttattagggcgtgggtagatttgttggtatttattttggtgaagtttacgatatttgtaaataaaatattgattttttcgatttgttgtattttaaaagggcggaaggttataggagttttttggatggaagattttttttttttgtttttggggttcgaggtggtatgttttttgatagaatttttattttttttatttttttgttttattaagttatcggttatgatttttggtattacggaatgaattattttttttttgagggttttttttatttttaggtttttttcgtgtataatggattgttttattttgaggaaggtgtttttggattttatttgggatatgacgaataggtggatttcgatggcgtggatgtagtcgtggagtagttttttgtttagtagtttttagtgtagggtttcggtttcgggcgaggggaagtaggttttatttcggaaatggtagttaaaggtttcgaaaaggatagagtaggttatttttagatataaatttaggtataaaggtaagtgtatgacggtatagagtaaaaagagtatttcgatgtatatggagaagttttttatttgagataagtaagtatttgtgggtcggttgtggtcgtaaggttggagttgtcgtcgcgttttgagataggcgttaagatttggaattgcgtagttagggttagggcgaatattagtagggtgagagttagcgaggtttacgcgtaatgtcgggcgtatagtttggtgaaggtaaatagaaagaagtttatatatattaggaggaagtatagcgcgggggcgattatgacgattagtttggattttatgtggatcgtaaaatagatgttttatagaaggtaggcgaagtcgatgtagaagagcgtatatcggaatcggcgttgggtttgcgggaagtagcgttttaggtaggttttttttaggtttatcgagtcgaatttggggttttattagcggttggaggttttttcgaatagttggggtagttttttttgtttgcgtagtcggttttcgtcgtttattcgtcgggggacgttttcggagtttttagagttgttgtagttagaggagatgttgtatttgtagtgtttggggtggttgttggaggatagttgtttggggttgattttgacgcgtacgttgttgttgttttcgttggagtcgtagtttatttcggtgttgtggtgatgtagtagttgttggtggggtggggaagttatgttgtcgagtttcggggtttgtttcggtcggggttattagtatttgttagtaaaacggggagagttagcggcgtttttatttaggtatgtacgtttagaggttcgggatttgtttttgttttaaggggcggttttagtacgcgatttggataggtattatttgtttttgtggttttcggtttagcggtgtttttatcgtttttatcgtttttattttcgaggcgtacgagaatcgttcgggacggatttagaacgttcgggggttttcgtcgcgtggtcgtcgtggtttcgggatcgttttgttcgttcgtttttcgcgtttttcgtttcgagggtggttttcgcgtcgcgcggtttttttttttcgcgcgttcgttttttttagttgcggtttcggagggaagtttagattttgagcgtttttagtttcgcgagtcgtttgcgtataaataatttcgttggcggcgcggagttttttattttgtaggagtcgcgtttcgatgcgttaaaggcggcgcgcggtcggtttcgggttcggatttcgattcggagtagcgagtttcggcgggcgttttcggttcgcgtttttcggtcgtttttcgcgtttcgggtcggttttgttcgcggcggcgggcgttgggggtgggggcgtttcgggttgcgagtgcgcggagttcgtcggcgcggttcgtttagtggggtttgttttttttcgagtgcgtcgtcgttttcgtcgcggtcgtagttgtttcgggatcgagcgcgtggaattacggacgcgggtttttcgtcgggcggcggtgtagacgttgtcgtagagtcgggttttcgcgacgtcggtcgggacgttcgttcgttcgcgtttacgtcgggggtcgttttttcgagttagagatgcggtcgtcgtcgcgttcgtcgtcgtgtttttcgcggtcgttgttttatgtcggaagagttgtcgtcgttattattttcggtttttgtttcgttcgttgttattgatagacgcgcgttcgcgtcgtttttcgtttagtcgtagcgcgtacgcgcggttcgcgttcgtcgttatcgttttttggtttcggatacgcgtacgggtcgcgcgtcgtttcgttttggtgcgcgcgttgggttggggttgcggggcggggcggggcggggcggggcgcgcgttcggtttcgtttttcgtttcgggcggcgtcgtttttaggcggcgggttgtggtcgttgttcgcgtttcgggcgttgtgggttcgttttttttcggcgttttagaggtcgcgcgtcgttcggggtttcgattttgcggagagatttgaaggcgtttgtcgtggaagaagtcgttggtcgtaacgtttgggaaattaaaatgttgtttttttattcggtacgtttttgggataaatcgaagtttttaatcgttggatttttttttcgggaggttttttttgttttgtaagtaatgaatgcgggtttcggggtattcggtttgttttggatttgtttacggggcgatttttacgggtttagtttttaaagttgggtttatcgacgattacgttttttcg

SEQ ID NO: 333 - DNA, 3015 bp, Artificial Sequence
  Description of Artificial Sequence: Synthetic polynucleotide
cgggggaacgtggtcgtcggtgggtttagttttggaggttaggttcgtgaaggtcgtttcgtgagtaggtttagggtaggtcgagtgtttcggggttcgtatttattgtttatagagtaaggggagtttttcgggagggaaatttaacggttggaaatttcgatttattttaaaggcgtgtcgagtgggaaggtaatattttgattttttaaacgttgcggttagcggttttttttacggtaggcgtttttaggttttttcgtagggtcgggatttcgggcggcgcgcggtttttgggacgtcgagggagggcgggtttatagcgttcggagcgcggatagcggttatagttcgtcgtttagaagcggcgtcgttcggggcggggggcggagtcgagcgcgcgtttcgtttcgtttcgtttcgtttcgtagttttagtttagcgcgcgtattaaggcggggcggcgcgcggttcgtgcgcgtgttcggggttaggaggcggtggcggcgagcgcgggtcgcgcgtgcgcgttgcggttgggcgaggggcggcgcgggcgcgcgtttgttagtgatagcgggcggggtaggggtcggagatggtggcggcggtagttttttcgatatgaggtagcggtcgcgggggatacggcggcgggcgcggcggcggtcgtatttttagttcggggaggcggttttcggcgtgggcgcgggcgggcgggcgtttcggtcggcgtcgcgggagttcggttttgcggtagcgtttgtatcgtcgttcggcgaggggttcgcgttcgtggttttacgcgttcggtttcgggatagttgcggtcgcggcgggagcggcggcgtattcggggggaagtaggttttattagacgggtcgcgtcgacgggtttcgcgtattcgtagttcggggcgtttttatttttagcgttcgtcgtcgcgggtagggtcggttcggagcgcggggggcggtcggggagcgcgagtcgggggcgttcgtcgaagttcgttgtttcgggtcggggttcgggttcggggtcggtcgcgcgtcgtttttgacgtatcggagcgcggtttttgtaggatggagggtttcgcgtcgttagcggagttgtttgtgcgtaggcggttcgcggggttgggagcgtttaaggtttgaattttttttcggagtcgtagttggaggaggcgagcgcgcgaggaggagaagtcgcgcggcgcggaggttattttcggggcgagaggcgcggaaggcgagcgagtaaagcggtttcggagttacggcggttacgcggcggggattttcgggcgttttaggttcgtttcgagcggttttcgtgcgtttcgaaggtgggggcggtgggggcggtgggagtatcgttgagtcgggaattataggaatagatggtgtttgtttaggtcgcgtgttggagtcgttttttaggataggagtaggtttcgggtttttaggcgtgtatgtttaggtgggagcgtcgttaatttttttcgttttgttggtaggtattggtgatttcggtcggggtaggtttcgggattcgataatatggtttttttattttattagtagttgttgtattattatagtatcgaggtgagttgcgattttagcggggatagtaatagcgtgcgcgttaagattaattttaagtagttgttttttaatagttattttaagtattgtaaatatagtattttttttagttgtagtagttttggggatttcgggggcgtttttcggcgagtgggcggcggaggtcggttgcgtaggtagaagaagttgttttagttgttcgagagggtttttagtcgttggtgggattttaagttcgattcggtgaatttggaggaggtttgtttggagcgttgtttttcgtagatttagcgtcggtttcggtatgcgtttttttatatcggtttcgtttgttttttgtggagtatttattttgcggtttatatgagatttagattgatcgttatggtcgttttcgcgttgtgtttttttttggtgtgtgtgggtttttttttgtttatttttattaagttgtacgttcggtattacgcgtggatttcgttggtttttattttgttggtgttcgttttgattttggttgcgtagttttaggttttgacgtttgttttaggacgcggcgatagttttaattttacggttatagtcggtttatagatatttgtttattttaagtggggagtttttttatgtgtatcgaagtgttttttttgttttatatcgttatgtatttatttttgtatttgagtttgtgtttgggggtggtttattttgtttttttcgagatttttggttattattttcgggatgaagtttgttttttttcgttcggagtcggggttttgtattgggagttgttgagtagggggttgttttacggttgtatttacgttatcggggtttatttgttcgttatgttttaggtgaggtttaggagtattttttttaaggtggggtaatttattatgtacgggaaggatttggaagtggaaaaagtttttaaagagaggatgatttatttcgtgatgttaagaattatagtcgatgatttaatgaagtagggagatgaggagagtgagaattttgttaagaggtatgttatttcgagttttaagaataggaagaaaaagttttttatttaaaaagtttttatagtttttcgtttttttaagatgtagtagatcgaagaagttagtattttatttgtagatatcgtgggttttattaagatgagtgttaataagtttgtttacgttttggtgggttttttgaacgatttgttcggtcgtttcgatcgtttgtgtgaggagattaagtgtgagaaaattagtattttgggagattgttattattgcgtggcgggttgtttcgagtttcgggtcgattatgtttattgttgtatcgagatgggtttgggtatgattaaggttatcgagtagttttgttaggagaagaaggaga

SEQ ID NO: 334 - DNA, 3093 bp, Artificial Sequence
  Description of Artificial Sequence: Synthetic polynucleotide
gttattatattcggtagcggggtggtttttagtttttgttgttttttcgtttttttttttcgttcgttttcggagtttagtcgatttttgaggttttaattttatttatttttttttcgggtcgtcgtcgtcgcgtttttttttatttttattttttcgaggagagttataggttgtaaatttaattaatttcgtaatttatttttgtaaaattatttataaagatttttttttcgcgttcgcgttcgtttttttcgcgtcgggtttttttagttacggttataaagtgtttttttttttttttgagttttgtatataaggaacgcgggttggggttttgttcgttttttttttcgtttaaggtaaggatttcgggaatttgaagtttggcgtttattacgtttaggttcgtagttttttttttatagagtttgtattatgggaaaaaataaaataaaatttaggaaagggaggtaatagttattgggagttaatatagagttacgtagcgtttaaaatataaatatcgtagcggttagaaatttcgttatttttttcgtttttttaggttgttttgtcgaggttttttgagttttttcgtatattgaaaggtatcgtaggtgtagtgcgtattttttttttatttattttaagaagttttgtttcgttattagttttttttttcgggatgagtagggagagcgcgcggaggttttcgattttttcgattataattaagaaagaataatttttaaagtgtttaatattttcgtttttaagttttttaaaatataggggtagggaatattaaaatattcggtttttattaggaagattacggttttgaaaggaaatagtagatacgatattttattttatttggatttatgattaaaaaaataaaaataaaaatttaaagagttcgtttgtattttttttttttaaatttcggttcggttcgaaggtagggaatttaaaagatcgaggtcgatggaagagagttagcggggcgagcgagcgggtagtttttttttttgtttttcggagttatttagaaggataggggaagggaaggaagaagaggcgaggaaaaagaggagggagggaagcggaggttaggagcgacggagtaaggaaagtagtttgtaagcgagaaaagagggaaaaaatatagtcgtacgaatttagagagattataagtcgtacgtaagtagtagtagaaagagcgagagcgcgagcgcgcgtttttttcgcgtttggggttagatagtttttagattagttcgaattattttttaagtattgtttcgttttttttgtttcggtcgttttttaatttttttttttttttttttttattttttttttaaaaattaaaataatataagggagggtggtaaaagtttttttaaatcggtcgatttatttaaagataataataataataataaatatataataatttatattttatggtgggagagacgtgggattaattttcggtatttattttaatatttgatagttagaataaataaatatatatatttatattaatagatatatatagaaaatttggagttaaagtatttggtaagagcggaaaaaaaaagaattaaaaggtaaaataatgattatgagtagcggcggcggtagcggtattagcggtaatagcggcggcggcggtagtagtagtagtagcggcggtagtaatagtaataattatttggtgttcggttttttttagaaattttttgtattattatttttaagaattttagttttaagaattaatagagtttaattttcggaatttgagtttcggattttattattgttacgtggtaggggaggatttggtgttagtttttcgagatttttattgtttttggttaattaaaagtttttaaagttataagatttttttattggtcggtatatttcgaggtttttataagtagagcgtttcggatttggaggtttcggttcgaggttcgaggggtttgaaggtggtttttttttttcgggtttaagacgatggtatggtttgtttcgttattattacgtgggttttttttttgtgacgtcggcgttttcgttgtagtaaagttcggtttttggaattttgagaattaatttgttattcggtgatataagagggggagtgcgttttgttttttcggggtttggggttaatttttttttttttatttataaatttagtagatcgagttaaatgtataaaagggagcgagaggtttgaattattgggaaaagtatgttatatatatagtagggttagagaggcgagtaagagaaaaataaaataaaataaatattatagttttttttaattagaatattaggtattacgagaaaaatatttgttaagtagttttcggtgggtttatttgttttatttttatttaggataggggtttttgttgttgttttgggtttttttttttttggtgtggtggtttgggatttttggtttttgtattttgatggtttatggatttttgtttttgattttttgttttttgtaagtttgtggtgttacgtaaattataggatcggtatcggttggatttttttgtacgtgttttttttttttttatttaattttttaagcgttttaaagatgtattattttaatattaatattattgaaagaagtttaaatttttggttatatgtaataattttagtttttatttttttttttttttttttttttggtgtaatttttttttttttttttggatttttgttgaagtgtgttttttttgtattttagagaaatgtttaaaggatttgttttggtttggtttgtttttttttaggatagtaagtggtgggtttaatttgttattgttgatttttgggaaattttttgttgtaagaaacgtgtgtgtgggggggagggtgggggtggcggggtggtatgtgtgtgttttttataaaattttgtgagttaaatatttgtttgtgttttgtttttttttaaggttttgagatttttgttttcgaggttcgttttaaggtcgttgtaaaaaaatttttttagtttgtgtttaagagattagtcgg

SEQ ID NO: 335 - DNA, 3093 bp, Artificial Sequence
  Description of Artificial Sequence: Synthetic polynucleotide
tcggttgattttttaaatatagattgaagagatttttttataacgattttgaaacgagtttcgaaaataaaaattttaagattttaagagaaaataaaatataaataggtatttggtttatagaattttgtagaaaatatatatatattatttcgttatttttatttttttttttatatatacgttttttgtaataagaaattttttaagagttaataataatagattaaatttattatttgttgttttggaaagaaataaattaaattaaaataaattttttgaatatttttttgaagtgtaggagagatatattttagtaaaagtttaagggggaaaaagaaaattgtattaaaggaaaaaaaaaaaaaaaaagtgggggttgggattgttatatatggttaaaaatttaagttttttttaatagtattagtattgaaataatatatttttaaaacgtttgagggattagatagggaaagaaaaggtacgtataaaaaaatttaatcgatgtcgattttgtgatttacgtaatattataaatttgtaaaaggtaaaaaattagaagtaaaaatttataaattattaaaatatagaaattaaaaattttaagttattatattagaaagaaaaaaatttagaataatagtaaaaatttttgttttaaataaaaataaagtaaatgaatttatcgaaaattgtttggtaaatatttttttcgtggtgtttaatattttagttggaaagagttgtgatgtttattttattttattttttttttattcgtttttttaattttattatatatataatatattttttttagtggtttaaatttttcgtttttttttgtgtatttagttcgatttgttgagtttatgggtaagaaagaaggaattagttttagatttcgggaaagtaaagcgtatttttttttttatgttatcgaatagtaaattagtttttagaattttagaggtcgagttttgttatagcgaaggcgtcgacgttatagaggaggagtttacgtgatggtggcggagtaggttatattatcgttttgggttcggggagggagagttatttttaggtttttcgagtttcgaatcggaatttttaaattcgagacgttttgtttatgaggatttcgaaatatgtcggttagtgaaaaaattttgtggttttgagggtttttggttggttaggggtagtaaaaatttcggagagttgatattaagtttttttttgttacgtagtagtggtaaagttcgaagtttaaatttcgagaattgagttttgttgatttttagaattggggtttttagaagtggtgatgtaagaagtttttaggaaaggtcggatattaggtgattattgttgttgttgtcgtcgttgttgttgttattgtcgtcgtcgtcgttgttgtcgttggtgtcgttgtcgtcgtcgttgtttatgattattattttattttttaatttttttttttttcgtttttgttaaatgttttggttttaagttttttatgtgtatttattgatataaatgtatatatttatttattttagttgttaggtgttaaaataaatgtcgaagattagttttacgttttttttattataggatatagattgttatgtatttattattattattgttgtttttgagtgaatcggtcggtttggggaggtttttgttatttttttttgtgttgttttggtttttggaaaggaggtggaggagaggaaggaggggaattagggggcggtcggagtagagaggacgagatagtgtttggggggtgattcgggttagtttgggggttgtttggttttagacgcggagaggacgcgcgttcgcgttttcgttttttttgttgttgtttgcgtacggtttgtgatttttttggattcgtgcggttgtgtttttttttttttttttcgtttgtaaattgttttttttgtttcgtcgtttttggttttcgtttttttttttttttttttttttcgtttttttttttttttttttttttgtttttttgggtaatttcgggaggtaaaaagggaggttgttcgttcgttcgtttcgttggtttttttttatcggtttcggttttttagattttttgttttcgagtcgaatcgagatttggaaggaaaaaatgtaagcgaattttttgggtttttgtttttgtttttttggttataaatttagatgagatgaagtatcgtgtttattatttttttttagagtcgtgatttttttaatgagagtcgagtgttttggtgttttttgtttttgtgttttggggagtttgggggcggggatgttgaatattttgaaaattatttttttttggttgtagtcgagggagtcgggaattttcgcgcgttttttttgtttatttcgaggagagagattgatggcgggatagggttttttggggtgggtgggaaaggggtgcgtattgtatttgcgatgttttttagtgtgcggggggatttagggaatttcgataggatagtttgggagaacgagaaaggtggcgggatttttggtcgttgcggtgtttgtattttgggcgttgcgtgattttgtgttggtttttaatggttgttgttttttttttttaaattttattttatttttttttatggtgtaagttttgtaaaaagggaattgcgggtttgagcgtagtggacgttaggttttagattttcgaggtttttattttgggcgaggagaaagacgaatagagttttagttcgcgttttttatgtgtaagatttaggaggagagaagggtattttgtggtcgtggttgaggggattcggcgcgggaggagcgggcgcgggcgcgaaagggagatttttgtgagtgattttgtaaaaatagattgcgaggttggttggatttgtaatttgtggtttttttcgagggagtaagaatgggggaaggcgcggcggcggcggttcggggagggagtgggtagagttggagttttagaaatcggttgagtttcgggggcgggcggggagaaagggcgggggggtagtaggagttaggggttatttcgttgtcggatgtagtgat

SEQ ID NO: 336 - DNA, 2436 bp, Artificial Sequence
  Description of Artificial Sequence: Synthetic polynucleotide
agttttggatgataaggattaattgtttagggcgttggtcgagaggaataggaagagcgtttcgtggagtagggcgggcgagaagagtcgggcggtcgcggggttttcgcgtatgttgggtaggaagaggaagagttgtagtacgaaggttattagggagatgtataagaagtaggcgggggttattacgttgagtagtcgtagggttagtattttcgattatatttttgcggggttcggggtgagaagaggattgattgattacggcgtttagggggcgttttcgttcgttttttcgtgtcgcgcgtttggggtattgtacgcgattttacgtttttaattttttgtttcgcggattttttttttttagttttttaatttcggattaggtaggttagagattcgagttcgtagcggtttcgggtttaggttttatttgggggtgagtgttgtttggggttttgagcgagttcggcgttttggcgcggtagagtttggtataggagggagggattcgtttgtagtttttaggagttgtgagggtggggggtatcgggggataggattttttttttttgtggatgtggaaataagtttaggtttgggatttttggtttagatttttttaggaggagaaagggaaggatttggggtcgggggtaggagaattagcggtatttgatttgttggaaattttgttttatattttttttttttcgtttttgcgtttttatttatatatatattttgggtagtatttagggattttattaggttatttaaggttttttggaggtatgtgtgcgtgagggattacgatgtgtgtgtgtgtgtttttgtttgtgattttgtacgtgtaatttgtgtgcgtttgagtatttgtatttgtgtatgtatatatttgcgtgtatagatacgtagtttttgttatttagttttaaaaaaattaattgaaataatcgatatatttatattcgttttcgggtatcgggtgaggtgggggcgtaattagaatatttgtgttagcgggttttggttagtatatttttttaacgttggttgttcgggttatttttttgcgaagagcgtttttatttgaggcgaaattaaaatttttttttcgcgttcgtttttcgtttttttgttgagagaaatttaaataatttttatggcgtcgaaattttttttatgtcgataagttcgttttgggcgtacgagtggatgtttggttagttttttttgggatcgatttcgtcgtcgtgtttagtttttattacgtttttattttattttacgttttatagtcggggtttttggttagtttcggaagttatcgagaaataggatttcgtgcgttcgagagaatttttttaggggttaaggaatcggttagtcggaggcgcgagaaaagttttgggaaggcggttgtatttaggatgggtggatgttacggggttttcgtttaggttgtttcgttcgtacgggtcgattggttattttggaattttttttgtaggttttagcgtttttcgggaattcgtagttttcgcggagagcgtgggtttttttttatcgttggggcgtagcgtagtgtacgtttgagggtggtcgtcgggggttgggtacgtttttagttttgcgtcgtcgggggttgcggcggtgttgtttattttagagagttttcggtttggggtttcggcgaagtaagtgttttttcggcgtcggtcgttaggggggcgcgggagtagttagatgcgtcgtagcgttgggaaggcggcgaaggataggggttaggggagtgaggggcgttcggtaggtagttttagttttggttttgcgcgggagaagggatagtagagatcgttcgtggggtttcggggtgtagggagttgttcgtttagttttggcgttcgtttcgttcgcggtagagggcggtatagtcggagttttggaaagatcggtagcgtcggtagtcgcgggtttttcggttattgtttttcggacgtacgggaagtcgtttttcgcgtcgtcgtcgtcgtattgtcgtcgtcgtagaggggtgaggaaattaatttatcgagttttggtcgtcgataagaggagtttcggacgtcggttttcgttttgttcgaggttgtaaagttgtggattcggttcggttggttcgtagtttgcgtttcgtttcgggaattgggtaagtagcggggatgtggggaggagggagcgggtagttgttggttttttatttgggcgttagcgagtaagggttaggaagcggcggggatggtagttgggtattttttagtttcgttattttttttttcgtttttgggggcggtgttttggtcgttagttttagtatcgtggatttgttttttttttttttttcgattttttttgagcgggttggggcgttttgtttggttttagcgttcg

SEQ ID NO: 337 - DNA, 2436 bp, Artificial Sequence
  Description of Artificial Sequence: Synthetic polynucleotide
cgggcgttgaaattaggtagggcgttttagttcgtttaaggggaatcgagaggggaggagggggtaagtttacgatgttgagattggcggttagagtatcgtttttaggagcggagggaggggtggcggggttggggggtgtttagttgttattttcgtcgttttttggtttttattcgttggcgtttaagtgggaagttagtagttgttcgtttttttttttttatattttcgttatttgtttagttttcgaagcgaagcgtaggttgcgagttagtcgggtcgagtttataattttgtagtttcgggtagggcgagagtcggcgttcggggttttttttgtcggcgattagagttcggtgagttgatttttttatttttttgcgacggcggtagtgcggcggcggcggcgcggggggcggtttttcgtgcgttcgggaggtagtggtcgagaagttcgcggttgtcggcgttgtcggtttttttaaggtttcggttgtgtcgttttttgtcgcgggcgaggcgggcgttagggttgaacggatagttttttatatttcggggttttacgggcggtttttgttgttttttttttcgcgtagggttagggttgaggttgtttgtcgagcgttttttatttttttagtttttgtttttcgtcgtttttttagcgttgcggcgtatttggttgttttcgcgtttttttggcgatcggcgtcgggaaggtatttgtttcgtcggagttttaggtcgagggttttttggggtgggtagtatcgtcgtagttttcggcggcgtaggattgggggcgtgtttagttttcggcgattatttttaggcgtgtattgcgttgcgttttagcggtagggagaggtttacgtttttcgcggaggttgcgggttttcggggggcgttgggatttgtaaaggggattttaaggtgattagtcgattcgtgcggacgggatagtttggacggaggtttcgtggtatttatttattttaggtgtaatcgtttttttagaatttttttcgcgttttcggttggtcgattttttagtttttggaaaagttttttcgggcgtacggaattttatttttcggtggttttcgaagttggttaggaatttcggttgtgaggcgtggggtgggatggggacgtggtgagggttgagtacggcggcggggtcgattttaggaaaggttggttaagtatttattcgtgcgtttagggcgggtttgtcggtatggaaaggatttcggcgttatgagggttgtttgggttttttttagtaggagggcgggaggcgggcgcgaaggggggattttaatttcgttttaaatgaaaacgtttttcgtaaagaaatagttcgggtagttagcgttggagagatgtgttggttaggattcgttgatataggtattttggttgcgtttttattttattcggtgttcgagagcgagtgtgagtgtatcgattgttttaattgatttttttaaagttagatagtagaggttgcgtgtttgtatacgtagatatatatatatataaatatagatatttaagcgtatatagattatacgtatagagttatagataaggatatatatatatatatcgtggttttttacgtatatatatttttaaagagttttgggtaatttggtgaggtttttgagtgttgtttaagatgtgtgtgtgggtggggacgtagggacggagaaaggggagtgtgaagtaggatttttagtaggttaagtgtcgttgatttttttgttttcgattttaaatttttttttttttttttttagggaggtttgaattagaaattttaaatttgggtttgtttttatatttatagaggggaggagttttatttttcggtgttttttatttttataatttttaaagattgtaaacgagttttttttttttgtgttagattttgtcgcgttaaggcgtcgagttcgtttaaaattttaggtaatatttatttttaggtggggtttagattcgaggtcgttgcgggttcgggtttttggtttgtttgattcggggttagggaattggggaggggaaattcgcgggatagggggttgggggcgtggagtcgcgtgtagtgttttagacgcgcggtacggaggagcgggcgagggcgttttttggacgtcgtagttagttagttttttttttatttcgggtttcgtaggaatgtaatcgaggatgttggttttgcggttgtttaacgtggtggttttcgtttattttttgtgtatttttttggtgattttcgtgttgtagttttttttttttttgtttagtatgcgcgaggatttcgcggtcgttcggtttttttcgttcgttttgttttacggggcgttttttttatttttttcggttaacgttttgggtaattagtttttgttatttagaatt

SEQ ID NO: 338 - DNA, 17219 bp, Artificial Sequence
  Description of Artificial Sequence: Synthetic polynucleotide
tttattgtatattatttattttttaggttgttagcgtggtttttagttttttttaagttaaagatatattatttttttgtgaataagtgtgtgaatgtggttgtgtggtttatttttttgtatttaagtcggttttatttattcggtaggaaagttttcgttaggtattgaggagtgtttgttatttagtttgtgtatttaagtatggatgtatgtatatgaatgttttttgtgtttttaagtgattttttttatatttttaaatgggttattgtttttggaacgtatttatagaaattttgttttagtttttagtttaataaagtttgggattttttttttagaatatcgttatatatttttgtatttgtatatttatgtttatattttttttggttagttttttattttttatgtattttttgttttatttgggtaacggagtttaagtgttttgatttgttttagtatatgttatttaagcgtatattttaatttgagtattcgtattatttttattttttttgttttgtttataatgtggtttttttttaggttagattaatatgggtttgtagtttaaatgtaaatagaggattttttaagattataaatttttaaagaaaggaagaggagggaggaggagattggaatgttagtaatgagttatttatgtatagggtaatttattcgtttattttaagttgaagaaagaattagataaatgtttgtagaggtgtattaaaattttagattaatttaatattagttatatatatatatatataaacgatggattttataatatattagtgtttagtttttttttggaggttgtttttttgtatatatttaattttttataagtttttggttaaaagtatgtttatttatatagagataatttaaagatcgttttgttttttttagtgtatatttgtatatgttggcggggtattttaggtttaggtttttggtttgtagtagttatagttagaggttttattcgattatagttatgtgtagattttttcgtttttgaatattcgtatgaattttttttgggaatattgagtttacgtttgttttttaaatttagtttttaaagtgagggtgtttattgtgtgtgtttatagtttttcgattgagaaatatttggttaaattagattatttagtagttgcgtttggtttgtggaagaatcgagttcgatgtattaagatgtgatcgtgtatatataagagaaaggaaaattttaggtttagatttatagtttttttttattgcgagttattttgtttttaggaatttttattaggttttttgtttttttttttttattatattattttattacggtttttaaagggttaagagaaatttttacggttttttttttatttagtttttgggttcggaggttagttcgtttattcgtagtttatagagtttgttgttattttcgcgttttttttttttttagttttttagtcgggagggagtttgtatgtttgtttagatcgatttattatcggtatattaataatattcgcgagagcgcggagattttgtttaggtttttcggttcgtacggtttacggcggatagaattcggggagcgtgacggtgtttgcggggtgggggtagggggtttataggtattggtcgtttcgagcgtattacgggttttttttagtttcggtttttcgcgtttttattagttcggttgtcggggtatagttatagtttcgcgcgttgggtagttttatttttattttgtttaattttaaattgggcggggagtataggcgtcgtgtttagagaataagagataggcgcgggaggcggggaggagtagttaggtagcgacgcgagcgggagcgagttaaagatatagtggaggcgatcgcgggtaggaagaaagagcgggttgcgcgggtttcgaggcgtcgtacgtaacgcgtcgtttcgcgaagttatattcgttttttcgtcgtttttcgttatcggtttttttttattttttagcggcgtttttcgtagtttggatagcgaggtttcggtttgtgtgggaggcggaggttaggacggttttgtaaagggttggagagaatcgttaatgagttgtgtagtttattgattcggagaatattttttaattaatttttagttatttattggtgatagcgttttaaaggatagcgttggggttagtcgagttttagtcgcgatttgtcggtcgggcgtttgttgtttaaaattcgcgcgtttttttaaatattttaaggtaattggtgtgcgtggcggtgtatattcgtatattgaaggttagtttcggattaaatttggatggtatattaattatcgttttttttttttatttcgttttacgcgttgaaattttgtttaaaataaatacgaaaattaatattgtaaaatttatattagataataggtcgagagaggagtgggtagggttaaggaacgagcgtattttttaagtgtttacgtataggaatttttgaggttgataattaaaatgttttttacgtaagtaattttgttggtaaaatcgaatttaatatttcgtaaggattgatttcggttcgcggtgttcgtttttagtgttataggaagtgttagatggttagaaatatttaagtttgtttgtatttattatttattattttttggggtgggttatttttttttagtttttatttttaggttattttaaggatttttttttaaaagattatttttagaattaaatattatattattttttttttagcgtttttttaaaacgaaaaaagggggggaaaatatagttaaaatttcgagttgtttagtttagacgtagcgaggttgtgcgaatatttatttgaagcgcgttggtttttttttaaggtttgtttttaaatatatataattttttttttttttttttcgtttttttattttttttatttttattttttagacgtcggcggcgcgcgttttggcgcgcgggtatttatagtttttagttggagatcgcggattttttggaaaagatttattaatagtaaattacgtttcgttcggttacggtttatacgttgttagattcgttcgttttcgggatttcgggaagggtttattcgagcgtgcgagcggcgggaagttcgtcgggattacgcgtgatttcggtcgttttattttatatacggtgttttaaggtttttttcgtaaatagtaggcgttcgttatcgtcgtcgcgagttttcgagttggcggaggttttgcggcgtagtcgttcgtcggtttcgagcgcgggtttcgcggcgtttcgtttttttcgttttggtcgaggattttgtttcggtgcgtaagttttttttcgtttatagtttttttgttatacgtttttcgagtgggattaatttttttcggtcgtagatttttatacgtttattagggttatttattagattttttattgtttagcggagggtttaggtttcgttcgttttcgttttttttttacgacgttgttttcgtataagtatattttatatttatttttgggggtttataatttaaaatttacgttgaatatcggggagggagaggagggggaaagcgggagggggatcgtagattataattttaaaagaatatttataaaataaagcgtttgatttggttggcgggcgggttaagtcggaattttttgttttgttcgattttttagtagtttttttttttaatttacgtgattcgtgttttggggtaagttaagaaaaaacgggatttttttttcgagttgcgcggtagcggcggtaggtcgagttcggttcggttcgaggtattcgttatatattttcgcgtacgtatacgtcgacgttttatttggaggaacgatcggttttcggagaggcgagacgaggcggcggtggcggcggttgggggtttttatagttttttttcgagtcgaaaaagaaagtagacggtaattcgttgtttttttttttttgttcgcgagttaacgtcgaatttagttttttagtttttagtttatttttttttttttcgttcgattcgcggcgtttagcggcgatcgcgttttcgcgtatagatatatataggttgtaaatttttattttgcgaattttttgttttttttttggtttatcgggaggcgttaggtttttagtcgcgttttttttttttttggtgtttacgcggggtcgtttaggttggttgtattttaaataatatagttatgaaataaaaacgaaagcgagttaagtagttaaagggaagcgcgaggtaaaagtttcgcggggtacgttgcgggagggggtttcgggagagggggtcgattgtagtttttagcgcgttcgttcgtttattcgttcgcggtttttcgggggaaaggtgtttcgggtattgatttgaaattttcggtgggggagtaggtagggagtttgcgattcggttttttgaagtttttttttaagcggattcgaggcggcgagaaggagcggggggcggttgggtgggtggagagagatatgaggggtggggggggttggcgacgttaacgagcggagaaggagtcgggtcggagaagcgcggcgagtagtaaagtttgcggttttcggttgttcgtagttcgttcgcggcgtcgcgtttattcgattttttcgtcgtttgttggtagtcggttgttttcggggtcggtttcgtcgaggggtgggttttgggtcgggtgggggcggggcggggcgggttcggggttttcgggtaggtggcgatagtttcgtgcgatttttcgggttttcgtagttggattgggtttggtcgagtttagtagttttcgcgttgtcgtcgtcgttcgcgttcgggtaggagttttagcgttatgttgacggttcgtcgcgagcgttcgttcgggttgggtgtgtgtgagtgtgtgtgagtgttggttaagtcgtttttgcgcggcgatagcgcggtttgggtttttcgttcggcggttcgcgggtttttttttcgtcgtcgtcgttcgtttagttttcgttttcggtcgcggtttgggtttttgcgcgtttttttcgtagtcgtcgagttcggttcgcgtttagcgaggagcgtagttttgttttattttgtcgttgggagtttaggtttcgtttgtcgtcgtacgtcgcgattttaacgcgttttttttttttggtttttttttttttttttttttttttttttcgttcgttttttttttcgttcgttttattttttttttttttaatagtcgtttttttttttttcgtaggcgtagcgttcgggcgatagtcgttcgttcgtcgtcgtttttagttttcgtaagtttgagtttcgttagttttcgtttatttttcgttgcggcgttttcgcggcggggtttcgggaggggtgattttttaggaaaggtttgttcgagttttttcggtcgttatcgatgtacggttcggtacgttttggtttttttggattcgaatttcggattatttgggtggcgtttttttttttcgtttttcggttttttttttttagttcgggtcgagttggttgcgtacgttcgattcgggcgtacgttttgggcgagtcggagatcgatttgggcggcggcggcggcgagggttgtcggtagagttagagtcgaagggatgggggcggcgggggcggtttttttagtcgcgcgtcgagatttttttcgttatttagaaggttagtggaggatcgtaattattataaagcgtttcgtatttcgtttagttaaagttgttaaattttagcggtagtagtcgttgtcgtcgttttttgttattagcgttgcgttttttcggtttcgtttttttcgagatttagcggagcgtggtttgtgtgttttcgtgtttatttttattttagtttgttttttttttttagaggagtttttttttatttcggtgttaaaagttatttgaaaatattattttaggtaacggtggtcgtttcgtttgaatttcgcgttcgagtttttcggacgttttaattgtgtgggaattgtttggaggtgggggaaggggggagtagttcgtggaggtatcgggaggcgtgtggggggcggtcggcgagcggagattcgtttgtatttttttcggttttcgagtatttttacggtttgtatttttgatggttggaggggttgtttaggtttttcgtttcggcgttgggagattatttttcgcgttttattttttttgatagggagtaatttttggtttatatcgttcgttttataaatttttattcggtaacgtcgtgttgatcggtgtttggcggcggcgtatagtttgcgttcgtagtagtttaatttaattgatacgtattgagtttttttagcgtattcggcgcggttttgggcgcggggggagggcgggggtaggcgggagggagggggaagcggagaagcgaggtttcggttttttcggagcgtaaagttttaagggcgagtcgagaagttttagttggtgaagttggcgggaaggggtaggagtgggggagggggtatttcggattaatcgcgtttagattgcgggttcggatttcgcggttaatggtgattttattcggttgtttattagggtttttttatattgggaagggggtggggtgtttttttttgtttaaggataagatggtgtaggttttatgaaatataaatttgaaatggaggtggtttgtaaatttatacggaaagtttttaaaatattttggagtgtttttatgttaaaaataattaaaagtattttaagttgattattaagttaaggttaaggttaaaattagttttagttagtagatatttttttttttaaaaattagatttattattgattgtgggattggtattaggtgcgattttatttattttgttttagtttttagtatatagttataaaaatagttttttttaaagtagaagtgaaatatttttatcgtttgaaattcgaaatttcggtagaattaaatttttatgttttagagttgtttataataattgatgtaaaagataggcgagtaagtgttttcgcgagtagtgtttagttaggttgggtcgcgaacgtttttaggattagcgtttgtagaatggaatgtacgtttttttttttttggtttttttgggggtggatatttttgtaagttaatttatatatttttttaattttcggtaataagtagaaagatatttggattattatgttgtaaaattattttttataaagatattttaggattagatattaaaagttattagattgaacgtatgcgagttatagatatagttggagaaaaggtttttggttgtgtgttgtggtaatatttttttttgaagcgattttttttatttaaaataagttaaaaataatcgggaaggttgaagttgggtatttgtggggaaattttgaacgtggttttaggcgaggaggtcgttttgttgttgtaggttggacgggagaattggtttgggttagtgtggagtcgtgttaggttttttcggttcggttaggtcgaatcgtagaggttttggttcggcgtttagttattttttatttttttttttcgtttttttaattttgtttttaggtataggtttttttcggagttcgaagtcgtatgtaaacgtttagaatttttagaaaatttaggaatcgagttcggggtttgtagttttttagagttttacggtttttcggggttgttgataaagaggtttgtttgtttaattttaaaagttttagaattcgggaggttgagttaggagaatcgtttgaattcgggaggcggaggttgcggtgagtcgagatcgcgtcgttgtattttagtttgggtaataagagcgaaatttcgttttaaaaaaaaaaaaagaaaagaaaaagaaaaaaaaaagttttagagttaaaatgaataggggtggtgggggtgttgtaaatgcgaaggggtcgaggggagggttgattgggggagaaatttgatgttggagataaataggttagtaaattcgtttttgacgtaatttgtaatatttttttttattttttttagggattttgtttttacggtaggttggtaggattaaagggttttttttttattttttagggatatattttttaatttcgtgggattttaaaaatattttattaagggagttttaagaggtatgagtggtgggggggattcgtgatttattgggaattaaaatgtgggattttttcgaggcgttataaggtagagggggggaggggagattatatttattggttcggttagttttaattgttttggggaaaataagtagaaagttgtcgaagggtaattttattttgtgtttttatttaagaaggggtttagggagttggggatgtcgcggggtttgtaatgggtgtcggcggtttggttttttttttgttttttttttttttgtttttttataagtttttcgggagttgattcgggggttaggttgttatatttagtatttagtaaggggaggattttaatgaaaatagaggaggaggagagagtgagtaaaggagtgtatgggaggggaggtcgtgtagtttacggagaaataaagaaataggtgtcgaaatgagaggtgttgcggatggagtagcgggggttgttttttcgttattaatttttttttttatggaagtgttttttgattataataaattattcgattttaggttaattaggttttgtaattgggtaatcgagttggtttttttaggagtaggttttgagtttggttgttttttttaaggtaggttgattttgtaagattcgttagggttttttttatatatttttagttttattttggtttaggggaaaggttaggtattttgtgtttggggggattttggttttttaattttgtgtgtaagatttatttataacgtatattaggatttatattataaagtttataacgtatgtgtaggttttcgatggtttttttcggaggttgtttttagggcgatgatatttggtattggaataggtgggattcggatgagtatagataatgtatttttatataatgtgaggtagtttttttttaaaaatatatttatatttatagttttttggttattttgtataagaattttgggtttatttaatggtattttaaaaaatattcgttgttttattttttaagtataaggtatagttggttttttttttgaaatttaaacgaggtaataaataggaggcgtattttttttttaggattttatttatttggaaatatttaaaggtagttgttttttagggtagaagattgttggatttaagggtcgttaggttgaatatgattgtttttttttttttttagtttttggagggttattgggtgtttggggaaggaaggttttaagggtagttttttcgtggtttttagtaattattttggaatttttggtttgggttcgatttgggttaggttttgagtttttcgaatataggtacgtgtgggtgaattggtatttatattacgggggttcgtagggtggttgggtgtcgattaaatgggtataatataggaggtttttgggaggttggtcgttttttgcgttcggtaagggtttaagagttttcgacgtcgtcgcgttgggtcgggtgtttttgtagataaattcggacgttacgtttcgtttcggttgtttatttagtaaggcgttttttgcgtatattttattcggttgggggtagtgagtgggaatcgtcgggagagggggcggggaattattaattattcgttttcggatttagtgtgtcggttttcggttttagttattttgtatttagttttttttttttatttttatcgggtttttgcgaagacgtattatttcgaattttttcgcggtattattttcgaattggaggggtagagaaggttttgttagtttttcgtttgtagtaggaaggtgggtacggattagtagaagggaaagcggtgttgatttgtttttaaatatttttgttttttcgtttttaataaagtcggttatagaggtgagtggcgcgggatggttgtttcgagaaggtcgtagttaggagtaaagttttggggtttataacggattgggtattttaaacggtgtaattttcggtatattttattcgtttttattttatttttcgaattattttgttttcggtgtttatttttttttttatatttgcgtttttagcgcgttagtagtcgcgtagttttcggttttgagtgcggggggtggggtgggggggtttagggtggtttgtgtggtgcggtttgatagaattttttgtgtgcggcggagggaggaggttaatgtataatgtatagcgtttggaagttcggttattagcggtttgtcggtgatatagataaacgattgagagggaggagatttagttcgttttggagtttaaatagattagcgtggaggggaaacgttatgatttaaaagtgtgtgtttgtagatattcgtatatattttaatgatttttagtaggttatgtgttttagttttgtatttttttttttttaaaaggaggatgtgtttagaggagggaggatgaaggtagagtgagaggttttaatttagatttattagtagtttttgagagatgaaggaggggagaagtttagaaagcgaggtttggggaagttatacgatttaaggttaagtttagattttgtttttaaaataataatttaaaaaaagagttatttagttttttattttggattatattttgtgttgtattagaaaggtttgggggaaagaataaattttgttatttttgtttttttcgggagtttatatttttgaattttttttttttattgatattttagagattttttttttttcggtttaatatattagtgttttttagtaattaaggcgagaagggggtggggataaagataagttaattttttttttcgttatgtaagtgtgagagataagataacgttaagttggggtaaagcggttgtttataatttttttttagcgattttgatcggttattttttatttcgtaaaaatgtttttttcgaaaattggattaaaaaagaaaaagagaaaaagaaaagaaagaaagatttttatttggaagtgatatttaaaatttattttttttttattgataatttattttttattggcggggttttttaggaaaagtcgtatttcgattgtaggattttaggttttttcgcggggggtaggattattagtgtaattaggttgaataaaattagggatgcgtgatgaggatttattttgtatttaatttaagttcgcggttgggtttttttttttttagttattggtcgatgtttgtgtttcgttatcgtatttagtgtttttaaattaaataggtagttatatttgggagggttatataattatgttaatatgaagtggttgttaatgcgaaataagaagaaatttttttgatatttataggtttttataaagggagagaaaggaaattatattttttagaattcgaaagtttttagtcgaatcggattttcggggagttttagaaattttttttttcgtataggaatttcgcgaaggggttttcggaagattttgtcgaggaaggttttggtattagattttacgattttagagcgttttgtaaatttttttcggtttagtggttagttttagaatgtaaattttaaggcgggcgttttagattaagttgatttagtttttgtttatttttagtttataatttcgaggtttttattttttgttttcgatcgggtcggtatcgtggcgttcggtatatgttaagtttatcgtttttaagttaggttgtaagatttaaaggttggggtttgtcgcggacggattgtttttggggagttgaaatcgtttagcggggaaattttttttttcgttttttttcgaaaagtttggtcgcggtttaagtttcgagtaagcgggtattcgttgatagtcgggttttacgtaaggtttatacgcgttttattagttagttcgagtttttttcgggcgagtcgtttggcgcggttttaaggtcgggtttaggcggggagagggtgcggggtcgtagcgagttgcgggcggaggtgcgggtttcgcggagttcggttaggttcggtttcgcgtttttgggttcgcgggtaagttgagtcggcggggtaggtcgttttttggttggcgtcggggcgttaagttgcgttttacgtgttcgttatattagtagtagcggcggcggcggcgaggagggggtgttgggaggcgcgcggtcgttttcgcggggttttcggatttcgttttttcgttttttttcgtgggggttgggtcgagattattttgcggtttttattttagcgtaagtcgaaagcggcgttgttagacgtagagaggtttttggggcgtcgtttcgagagtcgcgcggcggtagtagttaggggagggtgtttttcgcggtcgtttcgtcgtcgtcgtcgtagttacggggatcggaagttttcgcgtcgtttcgagcggttttcgttggttttagggttgttttagacgagggttggtcgcgcgttatttttgattttttttcgttttaggcgattattcgggttttgcggtatttcggtgtaagtcgagaggattttttttgcggttcgatgagatgtttttgtttttttgttattattataagtacgttttttcgtatcgttcgtagtttcgtagttgggatcggaggggcgcggagtcgttatttcggtcgggtaggaatatttgtttttaggttttgtagttgggcgcgtgttgttgtgagaggttgtttattgttgtgtgtagagatcgcggaggagaaaatagggtttcgaagtttagggttaggagtagttaagtttcggttatttttattttttatttattgtaggcgatagagcgcgaagttagagggtttgttgggggttcgggttttttttcgaaggtcgaagggtcgttatttttgggattcggtttttggtttgaagaggtcgtttataaaatagatggggtaaaatttgttttgggagtttttttagtgttcgttttcgttttttaaattagatatatttattttttttttagttttattttagttttcggcgggggacgggagtaggttatggcggtatcggtattttattcgtttttttttacgtagggacgtagggtcggttgcggggttcggattttgttattttatttagggaagggttaatggacgtttttcgtttttttcgtgttcggaggagattcggcggcggagttgatttgtaaggtttgttttgttttatttattttttattttcgttttatttttttcgatttttttggtttagggttcggttcgggaaggcgttgttttgttagcgggagtcgagcgagtgtatagagaaaagtttttttattttaatgagagtgtatatagcgttgtagcgaggaggatgattattcggcgggcggggggcgcgggttcgggtcgcgggcggcgtgtgcggcggtttcgcgggttcggagttttcgtttgtttggttgttaatcgtacgttttttgttgttacggaggtaggcgggagtcggcggtcgagtttagcgtcgacgattcggcgggtgatacggaaatatggcgtagcgtttttttttcgttcgcgttttcgtttttcgtttttttcgcgttttcgtttttcgtttcgtattttttttcgttcgcgcggtttttgtagttttaatgttttgttttcggtttggtattattacgttagtagtcgttttttcgcggtttcgcgcgttttttttttttttgttttcggggtttatagaaaacgtttgtttttgtttcgagttttcgttaaattaaatttgtggtggtaacggaaggcggtgtaggcggggaggggttcggggattttggtagtagtcggttagagcgtggtggaaatttttttcgttgggtttttcgtttttttttattttttttttttaatatagagtcgtcggtttttcgacgttttttttttcgttttcgagaggttttagtgttttaggaaggtttgggttatagagattgtgattaggggtgaagaatttagagtgcgtgtttgtgagtttcgaggttttggtattcgatgattttgttttttgtagtttcgatttatttttttttttttggttattcggggttttgtattagtcggtgaagaaggggagggaagagaaagtgtttttttcgtgcgtgtggtttttattttaaggatttgttggaatttgttatttttaattgtatagttttttttcgtataggatttagggcgaaagcggggaaacgtcggatttagggggaaagggtcgggttagaaatttagttttggaggttggatcgtatttttttggcgggtttagttatatttggtcggtacgcggggcggggcgatttagtagagtgggggacgtaagggttaggtttttcggtttaggagacgttaaacgttttaattttggagcgagagagtaggaattttcgtttttatttaagcgcgcgcgttttttagttcgacgcgtaagtcgtggtttttcgcgttagagttgtttaggcggtaattttttaagtttgtaattaagcgaggcgtcgtcgtgttttttgttagtgtcggttttgttagtcgtatatggttttggtgtttcggttcgaggtttcgcgattagttataggttcgtttcgttttttttttaattcgtttttgtaggtagtttggggacgcggtcgatttggcggcgttggtagggagttattgttcgcggggcgggttttttgattagtgttagtttcgttgcgttcgagtcggcgcgggttttggggtgcgggtttggcgtttttttttttttatagttttttggttggggtggcggcgtttttttttttttcgtttttttttcgggtttgcgagatttatttgtgtggtgttatttgtataaaaataggataagtgtttttgtgcgtttatacgcgggaggcgaaatttttattgatgtgtttgtgtggagttttcgattgtcggagcggtttgatttagggtgtttgtgttgttttttataagaaaggagagaaagttttttttaattttttcggcggtttgggtttttagaagtatgtttttttgcgcggtcggaatggtttattatttgggttttaagcgcgtcggatttatagcgagtaggttgagggttaggcgggaggtttattatgatttataaaatcgggcggtttaatcgttagttgttaatttatttatatgtggagttttttaatgtttttttcgttcgggttcggttttttgagggtttgtttcgatatagttagagtcgttaagtgggagttaatttagtggtttttttttttcgtcggtagcgtggtttttttttttcggcgattttcgtttttttggtttattgcgttgttcgttagtaattttttagtttggataaatagttgggagggcgtcggtcgcgcggagttagtaaattaattattaatttttaagcgaggtttggattaggggagggagcggcggttagagtcgagttcgcgaggcgagcgtaaagtttttatcggggttaggagttatttacgcgttaacgaatcgggtgcgtgaaggcgggtttcgttatggtttttcgggtttttttagaagttttcgttcgtcgggttttttaagttcgtattttgtttggttaggtaggtcgcgttatagcgttgtttttgggagagtttgaatattaacgagtcgtttcgggttttagcggtttgttttttataggagagcgtttcgcgtttgggtaagtttttcggattcggtcgggttttttttggtttaggtttgttaaattaaattgatcgtattttgtatcgattaatttttttgcggtattttttttttttagtttacggtggagtcggtacgtagggggttaaaagtttcggttcgttttggtttttcggttgcgaggagaaaacgttgattaaagtgtttaaggggaaggtaatatatgtatattcggtttcgggtcgaaggaggtcgattggagacggttttcgagttattcgtttcgattcgttttttatattttcgggaacgcggcggcggcggcggttttggttcgtacgattcgttcggcggagcgttgcgttgttgggttgggagggcggcggggaggaggagagacgagggggcgggaggcgaattcgggttgcgcgttaagaggttcggagtcgtagattagttatcgttcggttttgcgttttcgggtgcgttcgggaatcgggagggtaggcgtcggtttcgtttagtcgggtttttcggttttcggcgcgggtgtttttatttttattttcgcgcgtttttggcgcggttggttcgattttcggggattcgcgtagtcgagatttatttgttaggttaagggtaggatagaaattttgtaagcggagttttgtttgcgaataggaaatttttttttgatgaggtgttgttttttttttacgtcgggttttaaaataaaattttagagcgggcggttaggtatttagtttcgttcgttatggtcggcgattttcgtttttcggtttcggtttcgggcggcggagttaagttaatagagtcggcggacggattcggcgtcggtttcgcggagggcgttaggttgttatttttcggggttcggacggggtcggcgggggtgcggagtttcggagttttcgcgtttttttaggttttatagttatcgagcggttttgcggagttgttcgaggtcgtcgggttagcggtttttcggagggcgtggggggcggggaggtcgcgcggcgtcgtcgattcggcgaatttcgttgcgggagttcgggagggttgcgagttcggtttggtaaagtttttgtggaaattttatgttttgaaatttttgcggcgtcgtagaaggagggggagaggggagcgcgggaagcgcgcgggggcggtttgtattcgttttttttcgtcggggagtgggtttcgcggtttttcgggttttatgggaaagttggagggcggggacggtcgggttttcgggttcg

SEQ ID NO: 339 - DNA, 17219 bp, Artificial Sequence
  Description of Artificial Sequence: Synthetic polynucleotide
cgggttcggggattcggtcgttttcgttttttagtttttttatgaggttcggggggtcgcggaatttatttttcggcggggagaggcgggtgtagatcgttttcgcgcgtttttcgcgtttttttttttttttttttttgcgacgtcgtaggagttttaaaatatggagtttttataggaattttgttaggtcgagttcgtagttttttcgggttttcgtagcgggattcgtcgagtcggcggcgtcgcgcggttttttcgttttttacgtttttcggggagtcgttgattcggcggtttcgggtagtttcgtaaaatcgttcggtggttgtagaatttggggaggcgcgggggtttcggggtttcgtattttcgtcgatttcgttcgggtttcggagggtggtagtttggcgtttttcgcggggtcggcgtcgagttcgttcgtcggttttgttggtttggtttcgtcgttcggggtcggggtcgaggagcggaggtcgtcggttatggcgagcgaggttgggtatttggtcgttcgttttggagttttgttttgaagttcggcgtgggggaggggtagtattttattaaggagaaattttttgttcgtaagtaagatttcgtttgtagagtttttgttttgtttttgatttgataagtggatttcggttgcgcgggttttcgagagtcgagttagtcgcgttaggagcgcgcgggggtgggggtgggggtattcgcgtcgaggatcggggagttcggttgagcggggtcgacgtttgttttttcggttttcgggcgtattcgggagcgtagagtcgagcggtgattaatttgcggtttcgggttttttggcgcgtagttcgggttcgtttttcgttttttcgttttttttttttttcgtcgtttttttagtttagtagcgtagcgtttcgtcgagcgaatcgtgcgggttagggtcgtcgtcgtcgtcgcgttttcgggagtgtgggaagcgggtcgaggcgggtggttcgggagtcgtttttagtcggtttttttcgattcgggatcgaatgtgtatgtgttattttttttttaagtattttgattagcgtttttttttcgtagtcgaggagttagagcgaatcggggtttttaattttttgcgtgtcggttttatcgtgggttgagggaagagggtgtcgtagggagattggtcgatatagggtgcgattagtttggtttagtaagtttgagttaggaggagttcggtcggattcgaggagtttgtttaagcgcgggacgtttttttgtggagagtaggtcgttgaggttcgaggcgattcgttaatgtttaagtttttttaggggtagcgttgtaacgcgatttgtttggttaggtaaggtgcgggtttgaaaggttcggcgggcggaggtttttggaggggttcgggaggttatggcgggattcgtttttacgtattcggttcgttggcgcgtgggtggtttttaatttcggtggaggttttgcgttcgtttcgcggattcggttttggtcgtcgtttttttttttggtttaggtttcgtttgggagttaatgattgatttattggtttcgcgcggtcggcgtttttttagttatttgtttaagttgaggagttgttggcgagtagcgtagtaggttaagagagcgggggtcgtcggggaagggaagttacgttgtcgacgggaaggagaggttattagattagtttttatttggcggttttagttgtgtcggggtaaatttttaggaagtcgggttcgggcgaagggagtattgggaagttttatatgtaaatgggttggtagttggcgattaggtcgttcgattttatgagttataatgggtttttcgtttggtttttaatttgttcgttgtggattcggcgcgtttggggtttaagtggtggattatttcggtcgcgtagagggatatgtttttgggggtttaggtcgtcgaaggagttgagaaggattttttttttttttttgtagaaggtaatataaatattttaaattaaatcgtttcgataatcgaaggttttatatagatatattaataaggatttcgtttttcgcgtatgaacgtatagaaatatttgttttatttttatgtaaatgatattatataaatagatttcgtaggttcgggagaggggcgggaggaggaggggcgtcgttattttagttagggggttgtgagaggggaggggcgttaaattcgtattttagggttcgcgtcggttcgggcgtagcggggttggtattggttaggaggttcgtttcgcgggtagtggttttttgttagcgtcgttaagtcggtcgcgtttttaggttgtttgtagaggcggattagggaaggagcgaagcgagtttgtgattaatcgcggggtttcggatcggagtattaaggttatgtgcgattgataggatcgatattagtagaggatacggcgacgtttcgtttaattgtaggtttaaaaaattgtcgtttgagtagttttggcgcggagagttacggtttgcgcgtcgagttagggagcgcgcgcgtttgggtgggggcgggggtttttgttttttcgttttaaggttggaacgtttggcgttttttggatcgagggatttggtttttgcgttttttattttgttgggtcgtttcgtttcgcgtgtcgattaagtgtggttgagttcgttaggagagtacgatttagtttttagggttaggtttttgattcgattttttttttttaaattcgacgttttttcgttttcgttttagattttatacgggagggggttgtgtagttgggggtgatagattttaataaatttttaaaataaaaattatacgtacgaaagaaatatttttttttttttttttttttttatcgattgatataaagtttcgaatgattaaagggaaagaggtaagtcggggttgtagggagtaaggttatcgagtgttaaaatttcggggtttatagatacgtattttgagttttttatttttggttatagtttttgtggtttagatttttttggagtattggggtttttcgggggcgaagggagaagcgtcgggaggtcggcggttttgtgttggggagggggagtgggagggagcggagaatttagcgagagaagtttttattacgttttggtcggttattgttaaaattttcggattttttttcgtttgtatcgtttttcgttgttattataagtttggtttaacgagagttcgggataaaagtaaacgttttttatagatttcgaaaataaaggggaaagagacgcgcggggtcgcggagaagcggttgttagcgtaatggtgttaggtcgaaagtagagtattaaaattgtaaaagtcgcgcgggcgggaggaagtgcgaggcgggaggcgggagcgcggggagggcgggaggcgggagcgcgggcgggggaggggcgttgcgttatgttttcgtgttattcgtcgagtcgtcggcgttgggttcggtcgtcggttttcgtttgttttcgtaatagtagaaagcgtgcgattagtagttagataggcggggatttcgggttcgcggggtcgtcgtatacgtcgttcgcggttcgagttcgcgtttttcgttcgtcgggtaattatttttttcgttgtagcgttgtgtgtatttttattagagtagggaggtttttttttgtgtattcgttcggttttcgttggtaaaataacgttttttcgggtcgggttttgggttaggagagtcggggagggtgggacggaggtggggggtgggtgaggtagggtaagttttgtaggttagtttcgtcgtcggatttttttcggatacggaggagacggggagcgtttattggtttttttttaggtggagtggtaaagttcgagtttcgtagtcgattttacgtttttacgtggaggggggcgggtggagtatcggtgtcgttatgatttattttcgtttttcgtcggaggttagagtagggttgagggggagatgagtgtgtttggtttggagagcgggggcggatattgggaaggtttttaaaataggttttgttttatttgttttatgaacgatttttttaggttagaagtcggattttaggggtggcggtttttcgattttcgaaaggagattcgggtttttagtaggttttttggtttcgcgttttgtcgtttgtagtgggtgggagatgggggtggtcgaggtttggttgtttttggttttgagtttcggagttttattttttttttcgcgatttttgtatataatagtaggtagttttttatagtagtacgcgtttagttgtagggtttgggagtaggtgtttttgttcggtcggagtggcggtttcgcgttttttcggttttagttgcggagttgcgagcggtgcgggggggcgtgtttatggtggtagtagagggatagggatattttatcggatcgtaggaagggttttttcggtttatatcgggatatcgtagggttcgggtggtcgtttggggcgaggagggattaggggtgacgcgcggttagttttcgtttggaatagttttggggttagcggaggtcgttcggggcggcgcgagggttttcggttttcgtgattgcggcggcggcggcggggcggtcgcgaggagtatttttttttggttgttgtcgtcgcgcggttttcggaacggcgttttaggagtttttttgcgtttggtagcgtcgttttcggtttgcgttgggatgggggtcgtagggtggtttcggtttagtttttacggggaggggcggggaggcggggttcggagatttcgcgggaacggtcgcgcgttttttagtatttttttttcgtcgtcgtcgtcgttgttgttgatatggcgggtacgtgaagcgtagtttggcgtttcggcgttagttagggagcggtttgtttcgtcgatttagtttattcgcgggtttaggaacgcggaatcgagtttggtcgggtttcgcggagttcgtattttcgttcgtagttcgttgcggtttcgtatttttttttcgtttgagttcggttttggggtcgcgttaggcggttcgttcgaggggaattcgggttgattaatgggacgcgtgtgggttttacgtgaggttcggttgttagcggatattcgtttgttcggagtttagatcgcggttaagtttttcggggaagggcgagaggaggggttttttcgttgggcggttttagttttttagggataattcgttcgcggtaggttttaatttttggattttgtagtttggtttggagacggtagatttggtatgtgtcggacgttacggtgtcgattcggtcgggggtagggggtgggagtttcggggttgtgagttgggggtgggtagaggttaggttagtttggtttggggcgttcgttttgaggtttgtattttggggttagttattgggtcggggggaatttgtagggcgttttgaggtcgtggagtttgatattaaaatttttttcgataaagtttttcggaaattttttcgcgaaatttttgtgcggaaagaaggatttttaaaatttttcgagggttcggttcggttgggagttttcgggttttagggagtgtgattttttttttttttttttataggggtttataaatattagaagagtttttttttatttcgtattaataattattttatgttgatatagttatatgatttttttaagtataattatttgtttagtttgaaggtattgagtgcgatggcgaaatataaatatcgattagtaattaagagaaggaaaatttagtcgcgagtttgggttggatataggataaatttttattacgtatttttggttttatttagtttaattgtattagtaattttgtttttcgcgagaaagtttgaaattttgtagtcgaggtgcgattttttttggggagtttcgttaatggggggtgggttgttagtggaggggaggtgggttttaaatgttatttttaaatgaaaatttttttttttttttttttttttttttttttttttgatttagttttcgaaaagagtatttttgcgagataagaagtgatcgattaaaatcgttaaggggaggttgtaagtagtcgttttgttttagtttagcgttattttattttttatatttgtatggcggaaaaaaaaattggtttatttttatttttatttttttttcgttttaattgttaaaaaatattagtgtgttaaatcgggaggaaggaggtttttggagtgttagtggaaaaggaagatttaaaaatgtgggttttcgggggaagtaagggtggtagaatttatttttttttttaggtttttttggtataatatagggtgtagtttagggtggaaggttgggtggttttttttttaaattattattttaagaataaaatttgggtttggttttgggtcgtgtggtttttttaggtttcgttttttgaatttttttttttttttattttttaaaagttgttggtgggtttgggttgaggttttttattttgtttttatttttttttttttagatatattttttttttggggagggggggatgtaaggttaggatatatagtttgttggaaattattaaaatatatgcgagtgtttgtaaatatatatttttaaattatggcgttttttttttacgttggtttatttaaattttagagcgagttggatttttttttttttagtcgtttgtttgtgttatcgataggtcgttaatggtcgggtttttaggcgttgtgtattatgtattagtttttttttttcgtcgtatatagaaggttttgttaggtcgtattatataaattattttgagtttttttattttatttttcgtatttagggtcgggggttgcgcggttgttaacgcgttgggaacgtaggtatggagaggaggatgagtatcgagagtagagtggttcggaaggtggaatgggagcgggtgaaatgtgtcgaagattatatcgtttggaatgtttagttcgttgtgagttttaaagttttgtttttggttgcgattttttcgaggtaattatttcgcgttatttatttttgtgatcgattttgttgggggcgggagggtagaggtatttagagatagattagtatcgtttttttttttgttggttcgtatttatttttttgttgtaggcgaggggttggtagagttttttttatttttttagttcgggagtggtatcgcgaaggggttcggggtggtgcgttttcgtagggattcggtgggagtggaggagggaagttggatataaaatggttggggtcggaggtcggtatattgggttcgaaggcgagtagttggtggtttttcgttttttttttcggcggtttttatttattgtttttagtcgggtaaaatatgcgtagaaggcgttttgttaaataagtagtcgaggcgggacgtggcgttcgggtttatttgtaggagtattcggtttagcgcggcggcgtcgagggtttttaagtttttgtcgagcgtaagaggcggttagttttttagaagttttttgtattatgtttatttggtcgatatttaattattttgcgggttttcgtagtgtagatgttagtttatttatacgtgtttgtgttcggggagtttagggtttgatttaaatcgagtttagattagaaattttaagatggttgttaggaattacggagaggttgtttttagggttttttttttttaaatatttaataattttttaaaggttaggaagaagaaagaatagttatgtttagtttggcgatttttaagtttagtagttttttgttttgggaggtagttatttttagatgtttttagatgagtgaaattttgggaggaggatgcgttttttgtttgttatttcgtttgagttttagaggggaagttagttgtgttttgtgtttggaggatggggtagcggatgttttttaaagtgttattggataagtttagagtttttgtataaagtgattagaagattataagtgtgggtgtgtttttaaagaaaggttattttatattatgtaaaaatatattatttgtatttattcgagttttatttgttttagtattaagtgttatcgttttgagaatagttttcgaggaggattatcggaagtttatatatacgttataagttttatgatgtggattttagtatacgttataaataaattttgtatataaggttagaaggttagggtttttttaaatataggatgtttggttttttttttaggttagggtggagttggaggtgtgtgggagaggttttagcgggttttgtagagttaatttgttttgagaagggtagttaggtttaaggtttgtttttagaagggttagttcgattgtttagttgtagggtttggttagtttgaggtcgagtggtttgttataattaggagatatttttatgggaagggagattggtggcggaggggtagttttcgttgttttattcgtagtattttttatttcggtatttatttttttattttttcgtgggttgtacggtttttttttttatgtatttttttgtttatttttttttttttttttgtttttattgaaattttttttttgttgagtgttgggtatagtagtttgattttcgggttagttttcgaagggtttgtgggagggtaggagaggagggggtaggagaagggttaaatcgtcggtatttattgtaggtttcgcggtatttttagttttttgagtttttttttaagtgaggatataagatgggattgtttttcgatagttttttgtttgttttttttagaataattggaattaatcgggttaataggtgtaattttttttttttttttttgttttatagcgtttcgggaaaattttatattttaatttttagtgagttacgaattttttttattatttatgttttttaggatttttttaataagatatttttgaaattttacggagttgaaaaatgtatttttaggagatggaggagaaattttttaattttattagtttatcgtggaggtaagatttttagaaaaggtgggggaggatgttgtaaattacgttaaaggcgaatttattggtttgtttgtttttagtattaaattttttttttagttagtttttttttcggttttttcgtatttatagtatttttattatttttgtttattttaattttaggattttttttttttttttttttttttttttttttttttgagacggagtttcgtttttgttgtttaggttggagtgtaacggcgcgatttcggtttatcgtaattttcgtttttcgggtttaagcgatttttttggtttagtttttcgaattttaggatttttaaagttagataaataggtttttttgttagtagtttcgggaggtcgtaagattttgagaggttgtaggtttcgagttcggtttttggattttttaaaagttttggacgtttatatgcgatttcgaatttcgagaaaagtttgtgtttgggggtagagttggggagacgaggggaggggatagaaggtggttgggcgtcgggttagggtttttgcggttcggtttaatcgagtcggaagagtttggtacggttttatattggtttaggttagttttttcgtttagtttgtagtagtagagcggttttttcgtttggaattacgtttagagtttttttataaatatttagttttagttttttcggttatttttgatttgttttgaataaaaggagtcgttttaaaaagaaatgttgttataatatataattagaggttttttttttagttgtgtttgtaattcgtatgcgtttaatttaataatttttaatgtttggttttaaaatgtttttataaaaaatagttttatagtataatagtttaggtgtttttttgtttgttatcggagattaaaaaaatgtgtgggttggtttgtagagatatttatttttagaaagattaggaagaaaaaagcgtgtattttattttgtaggcgttggttttggaagcgttcgcggtttagtttggttgggtattgttcgcgggggtatttgttcgtttgttttttgtattagttgttataagtagttttggagtatgaagatttaattttgtcgaagtttcgggttttaaacggtagagatgttttatttttgttttgagaagggttgtttttataattatgtgttgagaattaaaatagaatgaataaaatcgtatttaatattagttttatagttagtagtgagtttaatttttaaaagggaaaatatttgttagttagagttgattttggttttgattttgatttagtaattaatttgagatgtttttgattatttttggtatggggatattttaggatattttaaaaatttttcgtgtggatttataagttatttttattttagatttatgttttatggagtttgtattattttgtttttaggtagaaagagatattttattttttttttagtataaaaagattttagtgggtagtcgaatggggttattattggtcgcgaagttcgggttcgtagtttgggcgcggttagttcggaatatttttttttttatttttattttttttcgttagttttattaattagggtttttcggttcgtttttgaggttttgcgtttcggggaggtcggaatttcgttttttcgtttttttttttttttcgtttgttttcgtttttttttcgcgtttagagtcgcgtcgggtgcgttggagaagtttaatacgtgttaattgaattgaattgttgcgggcgtaggttgtacgtcgtcgttaagtatcgattagtacgacgttatcgagtggaaatttatggggcgaacggtgtaagttaaaagttgttttttgttaaggaaaataaaacgcgggagataattttttaacgtcggggcgaggggtttgggtagtttttttaattattagaggtatagatcgtgaaaatgttcgagaatcgggagaaatataggcggattttcgttcgtcgatcgttttttatacgtttttcggtgtttttacgggttgtttttttttttttttatttttaaataatttttatataattgaaacgttcggggaattcgggcgcggagtttaggcggaacggttatcgttgtttggggtggtgtttttaggtagtttttaatatcgaaatgggaaagggtttttttgggaggaaggggtaaattggggtgggggtgagtacgggagtatataggttacgtttcgttgggtttcggaggggacgaggtcgggagagcgtagcgttggtggtaagaggcggcggtagcggttgttgtcgttggggtttgatagttttggttgagcggagtgcgaggcgttttatggtaattgcggttttttattggttttttgggtagcgaggggagtttcggcgcgcggttgggagagtcgttttcgtcgtttttattttttcggttttggttttgtcggtagttttcgtcgtcgtcgtcgtttaagtcggttttcggttcgtttaggacgtgcgttcgggtcgggcgtgcgtagttaattcggttcgagttggggaggggaggtcgggggacgaggagggggggcgttatttaagtggttcggggttcggatttagagaggttaaaacgtgtcgggtcgtgtatcgatgacggtcggggaaattcgggtaaattttttttggggaattatttttttcgaaatttcgtcgcggaggcgtcgtagcggagggtgagcggagattggcggagtttaaatttgcgagagttggaggcggcggcgggcgggcggttgtcgttcgagcgttgcgtttgcggggggaggggaggcggttgttgggagggagggaggtagggcgggcgggagggaggacgggcggagggagggggaggaggaagaggagggaattagggaggggggacgcgttgggatcgcggcgtgcggcggtagacggagtttgggtttttagcggtaaggtgaggtagagttgcgtttttcgttgaacgcgggtcgagttcggcggttgcgggggagacgcgtaggagtttagatcgcgatcgagagcgggagttaggcgggcggcggcggcggagggggagttcgcgagtcgtcgggcggagagtttaagtcgcgttgtcgtcgcgtagggacgatttggttaatatttatatatatttatatatatttagttcgagcgggcgttcgcggcgaatcgttaatatggcgttggggtttttgttcgagcgcgggcggcggcggtagcgcgggagttgttgagttcggttaagtttagtttagttgcgggagttcggaggatcgtacggggttgtcgttatttgttcggaggtttcgagttcgtttcgtttcgtttttattcggtttagagtttatttttcggcggggtcgatttcgagggtagtcggttgttagtagacggcgagggagtcgagtgagcgcggcgtcgcgagcgggttgcgggtagtcggggatcgtaaattttgttgttcgtcgcgttttttcggttcggtttttttttcgttcgttaacgtcgttaattttttttattttttatatttttttttatttatttaatcgtttttcgttttttttcgtcgtttcgagttcgtttgggggaaaattttaaagagtcggatcgtaggttttttgtttatttttttatcggggattttaggttagtgttcggaatatttttttttcgggagatcgcggacgggtgggcgggcgggcgcgttgagggttgtagtcggttttttttttcggggttttttttcgtagcgtatttcgcgaagtttttgtttcgcgtttttttttggttgtttggttcgttttcgtttttattttatagttatgttatttaaaatgtagttaatttaagcggtttcgcgtgggtattagggagggagggggcgcggttgggggtttggcgtttttcggtgggttaggaggagagtagggagttcgtagagtggaagtttgtagtttgtgtgtgtttgtgcgcgggagcgcggtcgtcgttgagcgtcgcgagtcgggcggaggggggggaggtgggttggaagttgggaagttgggttcggcgttagttcgcgagtaggaaggggagggtagcgggttgtcgtttgttttttttttcgattcgggaaagaattgtaaaaatttttagtcgtcgttatcgtcgtttcgtttcgttttttcgggggtcggtcgtttttttaagtggaacgtcggcgtgtgcgtgcgcgagggtgtgtggcgagtgtttcgggtcgagtcgagttcgatttgtcgtcgttgtcgcgtaattcgggaggggagtttcgtttttttttggtttgttttaaagtacgaattacgtggattaaaaaaaaaaattattaagaaatcgagtagagtaaggggtttcgatttggttcgttcgttagttaggttagacgttttgttttgtaaatgtttttttaagattataatttgcgatttttttttcgttttttttttttttttttttttcgatgtttagcgtaggttttaagttatgagtttttaggggtgggtgtagaatgtgtttgtgcgggggtagcgtcgtggagggagggcgggggcgggcgagatttgggtttttcgttgggtaatggggagtttggtgggtagttttgatgggcgtgtgaaagtttgcggtcggaggaagttggttttattcggagggcgtgtggtaaggaggttgtaggcgaagaggaatttgcgtatcggggtaagattttcggttaaggcggggagggcgaggcgtcgcggggttcgcgttcggagtcggcgggcggttgcgtcgtagagttttcgttaattcgggggttcgcggcggcggtgacgagcgtttgttgtttacggagagagttttggggtatcgtgtgtggagtagggcggtcgaagttacgcgtggtttcggcgggtttttcgtcgttcgtacgttcgagtgggtttttttcggggtttcggagacggacgagtttggtagcgtgtaggtcgtggtcgggcgaggcgtaatttgttgttaatgaattttttttagaaagttcgcgatttttagttagaggttgtgagtgttcgcgcgttagggcgcgcgtcgtcggcgtttggagggtgggggtggggggaatggaagagcgaagaaggaaggaggagggttatgtgtatttagaaataaattttaaaaagaaattaacgcgttttaaataggtattcgtatagtttcgttgcgtttagattagatagttcggggttttagttgtgtttttttttttttttttcgttttgagaagacgttagaggaggggtagtgtggtatttggttttaggggtagttttttggagaaagatttttaaaatggtttgggagtaaagattaggaggaaatggtttattttagaaggtggtgggtggtgagtgtagatagatttgggtatttttggttatttgatattttttgtggtattggaaacggatatcgcgggtcgaaattaatttttacgaagtgttgggttcggttttgttaatagaattgtttgcgtggaaggtattttaattgttagttttaaagatttttgtacgtggatatttagggaatacgttcgttttttgattttgtttatttttttttcgatttgttatttggtgtgggttttgtagtgttggttttcgtgtttattttgggtagggttttagcgcgtagagcggagtggggggggaaggcgatgattaatatgttatttaggtttaattcgaggttggtttttagtgtgcgggtatatatcgttacgtatattaattgttttggggtgtttaggggagcgcgcgggttttgggtagtaggcgttcggtcggtaagtcgcggttggggttcggttggttttagcgttgttttttgaggcgttgttattagtaggtgattgagagttaattaggaagtgtttttcggattaatgggttgtatagtttattagcgattttttttagttttttgtagggtcgttttggttttcgttttttatataggtcggggtttcgttgtttaggttgcggggagcgtcgttgggaagtggggaggggtcggtagcgagggacggcggggaagcgagtgtaatttcgcggggcggcgcgttgcgtgcggcgtttcgaggttcgcgtagttcgttttttttttttgttcgcggtcgtttttattgtgtttttaattcgttttcgttcgcgtcgttgtttggttgttttttttcgtttttcgcgtttattttttgttttttaagtacgacgtttgtgtttttcgtttagtttaggattagataagataaaaataggattgtttagcgcgcggagttgtgattgtgtttcggtagtcgggttggtgggagcgcggggggtcggagttggagaggattcgtggtgcgttcggagcggttagtgtttgtgggttttttatttttatttcgtaggtatcgttacgtttttcgggttttgttcgtcgtgaatcgtgcgggtcgggggatttgggtagggttttcgcgttttcgcgggtgttgttggtgtgtcggtgatagatcggtttagataggtatgtaggttttttttcggttgaaggattggaggggggggaggcgcggagatggtagtagattttgtgagttgcgagtgagcgagttagttttcgggtttaggagttgggtggagggaaggtcgtgggggttttttttaattttttaaaggtcgtggtggggtagtgtaatagggaaaggggggtaaagagtttagtggaaatttttggaggtagagtagttcgtagtggggaggagttgtgagtttgggtttagggttttttttttttttatgtgtgtacggttatattttggtgtatcgggttcgatttttttataaattaaacgtagttgttagatgatttagtttgattaggtattttttagtcggggagttgtgaatatatataatgaatatttttattttaaaaattgagtttggaagatagacgtagatttaatgtttttaaagagaatttatgcgggtgtttaaggacgggaaggtttgtatatagttgtagtcgggtggggtttttgattatgattgttgtagattaaggatttgagtttgaaatgtttcgttagtatgtataggtatgtattgaagagagtaaagcggtttttgagttgtttttatataaatagatatatttttaattaggaatttgtgaggagttagatatgtgtaaggagatagtttttaaagaggagttggatattgatgtgttgtgagatttatcgtttgtgtgtgtatatatatggttaatattaaattggtttaaaattttaatatatttttgtagatatttatttagttttttttttagtttgaaatgggcggatgggttattttatatataaataatttattattaatattttagttttttttttttttttttttttttttttaagagtttgtgattttaagggattttttgtttatatttaaattgtaaatttatattggtttggtttgggaaagagttatattataggtaaagtaaaaagaatggaagtagtacgaatgtttagattaagatgtgcgtttgaatgatatgtgttgagataaattaagatatttgggtttcgttgtttaaatggaataagagatatataagagataaagaattggttaaggggaatgtaaatatgggtatgtaaatatagagatgtatagcgatattttgagagaaaaattttagattttgttgagttggaaattggggtagaatttttgtaagtgcgttttagagataatagtttatttaaaggtgtgaagagggttatttggaaatataaaaagtatttatatgtatatatttatgtttagatatataggttgaatgataaatattttttaatgtttgacgaagatttttttgtcgagtgagtgagatcgatttgggtatagaagagtgggttatataattatatttatatatttatttatagggaaataatgtgtttttggtttgaaggaaattgagggttacgttagtagtttaaaggatggatggtgtgtagtgaa

SEQ ID NO: 340 - DNA, 2264 bp, Artificial Sequence
  Description of Artificial Sequence: Synthetic polynucleotide
gattagtttggttaatatggtaaaatttcgtttttattaaaaatataaaaattagttgggtatggtggtgtgcgtttgtaattttagttattcgggaggttgaagtaggagaatcgcgtgaatttaggaggcgtaggttgtagtgggttagagatcgcgttattgttttttagttcgggcgatttttaggttaaatcgtgttcgatataaaagtttatatcgatatagatttttcgatataaaagtttatttttttttgataggtttgatcgatttttttttttataaagataaaagttgttttaatatttaagaggaattatattgcggtgaaaggggtgttacgaattttgggttttagtttttgtattacgttttagtgtgatattggattttaatttttttattattaaagttaacgggttattataatttttttagaagtagttttaatttttaaagataagattaaaaatattaatagtgtttgagtttttggaatcgaattagtattggagttttgtttggtcgttttttttttttttttttaagattaacgatttggagggaattttggtgagttcgagttttcgtaatttgttagggattaattagaagttcggcgagtagttagtaatataatttttgggtatttttttagttttattagtatatttttttttatttcgttttttttcgttgtagttttttttaagtttatatttgcgttttcgttagttttttttgggattttatcggtgtcggtagttttcgggttttcgggtatagcggtcgttttattcgatttttttgtttttttatttttgtcggagggcgattcgtgggtatcgtttattacggataggattggaggggagaggagatcgcggagatgtttgaggtagaagttcggaaattcgagttgtataggttaggattttattttttgtcgtcgcgtagcgatgatattatttttatcgtttttttgaggggttattttgaggcgcgcgtagaggattagaggatttattttaattttggtttggcgatagtgggaagcgggaaaattggacgtaaagagtttagattatggatttttttcgttaggaaattagtatttgtgaaggagcgtagttttgtttattaaataattttttttttttcgtttgtttaaaaatgtaatgttagttaattttttcgttaattttttagagtaaagttgggggattgggagaaaatttagtttcgttgtatggcggtgtcgtggaatgaggtttttcgggattggtaaatttttaggtaaggatttaattttgtatattttaattggttcgaaatcgcgggtttgtgtgtatatagaattgttagtattttttttttatttcgtaagtattttaataataaaaagttatatagttcgagtagaatttatttaatttatttatttatttataattattgattgtttatttcgatttagaaatagtgttagtattagggaataaaatatatatagtttttatttaattaaatgattttttttagttcgttagtattgaagattgaggtttgtttttataagtttgatatttttttattagtttggttaattttattaaaattaagaggaaagtttaaagagaggaaggtgttttttttgaacgttttattttaatgaattagtttacgtattgggaggatgaagtggtgaggatatttttgttttaaaatttttttttttttttttattgagatacgagggggagggcgttttatttatttgggtatgattaggttttcgtatttattatatatttaatttatgcgtgttgaaagaatggatttggaaatgtaggtgcgcgttatatttatttttttgtttttacgttgtttggacgaattatcgtattttttgttttaggagtttttaaaatttttggggaaggagcgtatttcgggaggcgcgtataggtgggtttgtttgtttttttttatttgtataatgggggtttataaggcgttgtttttatgtttcgagaggcgtgtttcggtatagtaaagtttatttgcgttggttcgcggagtttcgtttagttaggtgagttagggggcggggcgcgggggcgcggtgacgcgtgacgtcggatttcggaagtgacgcgttcgtggggaaaaggtagggagggggtggtgtttttagtcggtttggggggtgcgttgttcggagacggaaagtttgggagttcgagtaggttcggttgtag

SEQ ID NO: 341 - DNA, 2264 bp, Artificial Sequence
  Description of Artificial Sequence: Synthetic polynucleotide
ttgtagtcgagtttgttcgggtttttaaatttttcgttttcgggtaacgtattttttaaatcggttggggatattattttttttttgttttttttttacgagcgcgttattttcgggattcggcgttacgcgttatcgcgttttcgcgtttcgttttttagtttatttagttgggcggggtttcgcggattagcgtaggtggattttgttgtgtcgagatacgtttttcggggtatggggatagcgttttgtgggtttttattatgtaggtggaaagggataaataggtttatttgtacgcgtttttcgaagtgcgttttttttttaaaggttttgggagtttttgggataggaaatacggtaattcgtttaggtagcgtagaaataaagagataaatgtaacgcgtatttatatttttaagtttatttttttagtacgtataaattaaatatgtaataggtgcggggatttagttatatttaggtgaataaaacgttttttttttcgtattttaatgagggaagagaagaaaattttaaaatagaaatatttttattattttatttttttagtacgtgaattagtttattaaagtgaaacgtttaaaggagatatttttttttttttaggttttttttttagttttaatgagattaattaaattgatagaaaagtgttagatttgtaaaaataaattttaatttttagtattggcgaattgaaaaaaattatttaattgggtagaaattatgtgtgttttgttttttggtattagtattgtttttaaatcgaagtaggtagttaatagttgtggatgaataaatgaattggataaattttgttcgagttatatgattttttgttgttaaggtgtttgcggaatggaggggaaatgttagtaattttatgtatatataggttcgcggtttcgggttagttgaaatatataaggttgagtttttgtttgaaagtttattagtttcggggagttttattttacgatatcgttatataacggaattgagtttttttttagttttttaattttattttgaggggttaacgaagggattaattgatattgtatttttagataggcgaaaaggaaaaagttatttagtaaataaaattgcgtttttttataagtgttggttttttagcgaggaggatttatagtttgagttttttacgtttaattttttcgttttttattgtcgttaaattaaagttaaaatgagttttttagttttttacgcgcgttttaaaatgattttttaggagagcggtaggggtgatgttatcgttgcgcgacgataggaagtaagattttggtttgtgtagttcgggttttcgagtttttgttttaggtattttcgcgatttttttttttttttaattttattcgtgatggacgatgtttacgagtcgtttttcgataaaggtggagagataggggagtcggatgagacggtcgttgtgttcggggattcgggggttatcgatatcgatggaattttagaggaaattgacggagacgtagatgtggatttgaaagaagttgtagcggaggaaggcgaggtaggaagagatgtattgatgaggttgaaggaatatttagagattgtgttattggttgttcgtcgggtttttggttagtttttaataagttacgagaattcgaatttattagaattttttttagatcgttaattttgagggggaagagaggggacgattaaataaaattttagtgttggttcggttttagaggtttaagtattgttaatatttttagttttgtttttagggattaaagttatttttaagggagttataatagttcgttggttttggtggtgaggaaattgggatttaatgttatattgagacgtagtgtaagagttaaaatttaggattcgtagtattttttttatcgtaatatggttttttttagatgttaagataatttttgtttttataggaaggagggtcgattagatttgttaaagggagatagatttttatatcgaaaagtttatatcgatatagatttttatatcgaatacgatttaatttgagagtcgttcgggttggagaataatggcgcgatttttggtttattgtaatttgcgttttttgggtttacgcgatttttttgttttagtttttcgagtagttaggattataggcgtatattattatgtttagttaatttttgtatttttagtagagacggggttttattatgttggttaggttggtt

SEQ ID NO: 342 - DNA, 3104 bp, Artificial Sequence
  Description of Artificial Sequence: Synthetic polynucleotide
gcgggcgttgtcgagtacggggaggtgttgaaatagttttggcgtgttgatttaagttttgattggtagagttattcggtgattgatagggggtttttatggcgttcgcgtcgttaattcgtttattttaatagcggagttagttcgtttgtcggcgtgtttgagtcgagtcgagttcgaattttaagtcgcggagttagtattttttttagtcggggtcgttcgttttcggtcgttgagttatcgtcgttattcggtagtgtgtttcgttgttttaattcgttttattaataagcgtttggtatatttagttaggttcgcgggtatttgttgcgtgtttcgtttcgggtttagtgttttcgtcgtcgtcggtattgtttcgatgttttagttgtttattttgaattttagtttttagtaagtggtcggggtatgtgagattttggaagagagcggcgatgtggagcgtttgggtcgttttttttggtcgttgttcgtggtttttgcggtttgcgaggtttttaataagaatgagtcggtgttacgcgtacgagttatcgtggttttttacggtggtaattatcgcgagttttattatattttggaaaattataagtttattaaggagtcgtacgttaagttgtaggcgttgtggtttgaagtatattattaggaggttgagaagttgcgtggaagatttttgggatttgtggataagtatcgagtaaggaagaagttttcgttgtcgcgtattatttgggacggcgaatagaagatatattgttttaaggagcgtacgcggtatttgttacgcgagtggtatttgtaggatttatattttaattttagtaaaaaacgtgagttcgtttaggtaatcggattgatttttacgtaggtgggtaattggtttaaaaatcgtcgataaagggatcgagcggttgtagttaagaataggtcggtatttagaggttttcgcgttttgagcgtatcggggaggaggcgggtggaggtatttttggcgtttttatttagtttttggcgattttaatttagtaggagttgggagcgcggtttgttttgggttaagagttttgcgttttgggtttttggtcgggagtttttttgtcggttttgtttttttattcgttggttttttacgtttgcgggtagttgtagtagttggtttcggttattaaattaaggttttattgggacggagaggggaagagaaataaaaaattaaaattttataaatagttagggattttaagatttaaagttaatttttgttagtttgggtataggtttttattattaatcgaagtttggtttattagtaatgtgtcggttttatgttaattattatttttaaagtttaggtatatttttttttaatgttttgaaaatagtttttaatggatttttgagaaatgggaagtcgagtttttttttttttatgcgttgtttgttatttttgttttaaaatagtaaattagttcgtgggtcgaggtttttcgtttttcggagtgtggatttcgattagttaaatattttgcggaagagttcggttttattttttaggtttaaatgttttttataattttttttgtttttaggtcgggtcgattcgatttaacgcgatcgcgggagtatttgtttaggcgtaagttttaggtagacgtatcgttagaaatggtattttatgtttttgggatcgatttgtttttgttatttatatttcgtttattttttgatagttttgtaaattttttaaaagtgtataataaatagggaggatattgtaagtttagtatataaaagatttgggagttgcggcgttgagaaagggcgcgaattatggtggggtataatagtagggattcgcggaggggcggtcgcggatttttgttcgatttttgtcgttttgtcgagtaattttcgttttaattgttggggttttcggaagaatttttagtcgtcgggttggagggacgtaggaggtggtgggggcgggcgacgggcggttgtgttacgagttgtgattcgtgttttttttttttttcgtagattttagtagtaggttttgttatagggtttcgggcgggtattacgggcggagggcgacggtacgttagaggtgttgggcgtcgttattagttcggtcgttagtttatttagtaaggcggttattttagttatttttattacgtttagcgatagcgagtgcgatatttgagttgtttatttaggatgtttagaagtagattttagtgtaaaaacgagaaaaataaaatgaaagaggggaagaagatgagagatttgtaaatttagcgttatagaagttaggtgattagggattcgcgggttcgggttgtcgtttttcgttttatttcgcggtcggtttggttttattggcgttttttggtcgcgattacgggaattagcgtgaggtttgatttagtattacgttttttttgttttgtttttttttaaggattttgttgtaaagttttttcggaattcgaattgtaagttgagcgtttgtttagatttttttatgggtattttacgtcgaaaggacgttgttatatatgtataattttcgttttaaagtttttttttaataaaatatatatatgttgtttatttatttatttaagagatcgttatggtaggtttttttgtagtttggggaatttgttgtttttaaatatgtaggttggtggtgatgggttttgtgtggagaagttaaataataaaataatttagtgggtaatttttttaattaagggagttgtttttagattttttttttttttattattattaatattattttttttattaggtatgtagggatttttgagtaaatggttttcggaaggttttatttatatattttttgttttttttggtgttttttggtatatgttttaaataatttatggtaggtttataattattttttacgttaaattatacgtatgtgtatatatgtatgtatttatataaatatatgtatgtatttatataaatatatgtatgtatgtatatacgtgatatatttaaggttagaaattggtaatatgtgagcgtttttttta

SEQ ID NO: 343 - DNA, 3104 bp, Artificial Sequence
  Description of Artificial Sequence: Synthetic polynucleotide
tagagaggacgtttatatgttgttaatttttagttttaaatatattacgtgtatgtatatatatatatgtttgtataggtatatatatatgtttgtataggtatatatatatatgtatatacgtgtaatttgacgtgggaggtggttatagatttattataggttgtttaaaatatatattaggaagtattaaagaaggtaaaagatatataggtaagatttttcggagattatttgtttaagggtttttgtatgtttggtgaagggaatgatattaataataataagaagaaaaggaatttgagagtagtttttttaattaagaaggttgtttattaggttgttttattgtttggtttttttatatagaatttattattattagtttgtatgtttagaaatagtaagttttttaagttatagagaaatttattatggcggttttttaaataagtaaataaatagtatatatatgttttgttaaaaaaaaattttaaagcgaaagttatatatatgtaatagcgttttttcgacgtgaaatatttatgggagaatttgggtaggcgtttagtttgtagttcgggtttcgaagagattttgtagtaaaatttttaggaaaaagtaaagtaagaagaacgtggtgttgggttaggttttacgttggttttcgtggtcgcggttaaagggcgttagtgaagttaggtcggtcgcggggtggggcgggaaacggtaattcgagttcgcgggtttttggttatttggtttttgtggcgttggatttgtaggttttttatttttttttttttttttattttgtttttttcgtttttatattggaatttgtttttgagtattttggatgggtaatttagatgtcgtattcgttgtcgttggacgtgatggagatggttgaagtggtcgttttgttggatagattggcggtcgggttggtggcgacgtttagtatttttggcgtgtcgtcgtttttcgttcgtagtgttcgttcggaattttgtgataggatttgttgttggagtttacggggaagaaagggaatacgggttatagttcgtaatatagtcgttcgtcgttcgtttttattattttttgcgtttttttagttcggcggttagaggttttttcgaagattttagtagttaaggcgaggattattcggtaaggcgatagaggtcgggtaggagttcgcggtcgttttttcgcgggtttttattgttgtgttttattatgattcgcgtttttttttagcgtcgtagtttttaggttttttatatattgggtttgtagtgttttttttgtttgttgtgtatttttgggagatttataggattgttaggaaataaacgaagtgtgggtgataaggatagatcggttttagggatatgggatattatttttaacggtgcgtttgtttggggtttacgtttgagtaagtgttttcgcgatcgcgttggatcgggtcggttcgatttaaaggtaaaaaggattgtaaggagtatttgggtttgggggatgaggtcgggttttttcgtaaaatgtttggttaatcgagatttatatttcgggaaacgaaaagtttcggtttacggattagtttgttgttttgagataagagtggtaggtagcgtatgggaagaggaaaattcgattttttattttttaaaagtttattgaaaattgtttttaaagtattagggagggatatatttgggttttgaaaatgataattaatatgaaatcgatatattgttaataagttaggtttcgattaatagtaggagtttgtgtttaggttgataagaattagttttgggttttggggtttttaattgtttgtaggattttaattttttattttttttttttttttcgttttagtgaagttttggtttggtgatcgggattagttgttgtagttgttcgtaggcgtggggagttagcgggtggggaagtagagtcggtaagggaattttcggttaggagtttagaacgtagggtttttaatttaagatagatcgcgtttttaatttttgttgaattggagtcgttagggattgggtaagggcgttagaggtgtttttattcgtttttttttcggtgcgtttaaagcgcggaggtttttaggtatcgatttgtttttggttgtagtcgttcggtttttttgtcggcggtttttgaattagttgtttatttgcgtaggggttagttcggttgtttgggcgagtttacgttttttgttggggttagggtatggattttgtaggtattattcgcgtagtaggtgtcgcgtgcgttttttgaagtagtgtgttttttgttcgtcgttttaaatggtgcgcggtagcgggaattttttttttattcggtatttgtttataggttttaggggttttttacgtagttttttagttttttggtagtgtgttttaagttatagcgtttgtagtttggcgtgcgattttttggtgaatttgtggttttttaggatatgatagagttcgcggtagttgttatcgtgaaaggttacgatggttcgtgcgcgtagtatcgatttatttttgttgagggtttcgtaggtcgtaggggttacgggtagcgattagaggaagcgatttaggcgttttatatcgtcgtttttttttagggttttatatatttcggttatttgttgggggttgaaatttaagatgggtagttggaatatcgaggtagtgtcggcggcggcgagggtattgagttcggagcgggatacgtagtagatgttcgcgggtttggttgagtgtgttaggcgtttgttgatgaggcggattggggtagcgggatatattatcgggtggcggcggtggtttaacggtcgggagcggacgatttcgattggaggaggtgttggtttcgcggtttggggttcgggttcggttcggtttaggtacgtcggtaggcgagttggtttcgttattggggtgggcggattggcggcgcgggcgttatggagattttttgttagttatcgggtggttttgttaattaaagtttgaattagtacgttaggattattttagtattttttcgtgttcgatagcgttcgt

SEQ ID NO: 344 - DNA, 2493 bp, Artificial Sequence
  Description of Artificial Sequence: Synthetic polynucleotide
attggtatgattagagtagaaggagggtattttaatttttagttttatttatcgttttgtaagaattaggaaaatgaatttttgttggttataaaattagttgtaggtgatgtaatttattttattcggttttttatatttatagttatataggaataattttttgaaatttagtttttttattcgtaaaatgggatggtaatacgtgtttttgggagttagcgagaattaaaagggataagatgtattggtttttaggggtaagtattagtagataaggaatagggtagttttttttttatattttatagagaagaaatgttttttaatttttttaggaggtagagtttagttttttttttaaatagttttggagttgtttggtttttttatttttttaacgaagttgtgggtagaagataaatgtagagtttttttgtatttgataaggagagagaagtagattttgtgtgagttttttgttgttgacgttgatttatagggggtgtaggatgggattgaggtaggtttatttgtttggaaagtttgtttgtattttgattttatggggttttaatatatatttttttagttataggggttttgtagagttaagttagttgttttatggaggtggggattttttttttgttttgttatttttttttttttttggagaggataggtaggtgggtatggttataggagaatttttcgaaggtgttaattggtttagagaaagaaaggtggtttggtagggagttgtttattagagattgagagagtatgggagaagttgagagggaggaggaaagtgtacgttattttgcgcgtagtttcgttttagggaaagtatgtgtgagaagtggtggtaggcggttgttagttttggaaataaataaatagttaattaaaaggtttcggaaggaaggagtgtttaattaattagtttcgagggataggttcgtattgtttgattgtgttttttagtttggttttaggttatcgagtttaagtttttgttatagttttagggtcgaggttgtttttaaagagttttgtaattgttttttatttgtgttttatttaaatattaaggttggcgtaggtggatatttttttatttttttttttttaggttgggttttagaaattagtagaggagggaggaattagttagcgtggttatgtttgggaggagaggttcgtgtgggtttgtggggttaagaggtaaaggcgggtggcggatgtgggttagcgggagtttggaggggttgatatcgtttgttttatcgtaagtttttggaggaagagtttcgttgtgttcgagagcgagcgcgggtaggtgtaattattcggggttggggtttcgggggtttcgcgtagttttttttttttttagggatatcgtttagttgcgtttcgcgtttcgtcgattgcgcgggttttgagacgttggtggttgtttcggggttggtttgtttttcgcgtatatgtttagggttattcgcgttgcgtttttgttttaggtgtttggttagagaaagggcggtaagacggggtagtgcgtgtgcgcgcgcgggtaagtgtatgtgagtgtatatttatgtgagcgtatgtgtgtttgcgtttgtgcgtgtttaggggaattatagggagtatttttattttaagtttttagaggattgtttgaagtcgttagatagaaatttttttagaatgtaagtttcgggggggagggagttttgtttgatggttgttgtatttttagtgtttattgaagtattggggatatattagatgtttaataaatagttgttgagttaattaacggattttaggaatggaggtagatcggtttttttggaattggagaaaggataaggttatattttatcgttttttttgtttttggtattagttttggcgttttcggtaacgttaattttttttatatttagtttgtgttaagtttttttttttgttcgtgtttatatttttttttttttgtttttgttttttgttggtttttgtgtgtaagtattttagtagttagagtgagaggaagacgaaagaagtagaattttggaaatagagagttattagggtggttttttttttttggaaggatacggaaagatggggtgagattggcgtttttttttagtttttttttttgggaattgggattttgagttttagtttttttattttgaaatagtagttattttatttgtttcgtaggattgttgtaagaagttaggtaggaggttgaaaagttttggagtatatgataggtgttatagaaacgttcgtttcgttttttgattagtatttaatagtttgggagtgttttaggtgtggttgagggtggttatggtttgataattattattagaatattttttttttttttataaaatgttttgaggagaatttaatggttgtcgaaaattaaggtaagttttatttttaaaatatttaggagttaat

SEQ ID NO: 345 - DNA, 2493 bp, Artificial Sequence
  Description of Artificial Sequence: Synthetic polynucleotide
attgatttttgaatgttttagaaatgaagtttgttttaattttcgatagttattaaattttttttaaggtattttgtgaaaaaaggaggggtgttttggtggtggttattaaattataattatttttagttatatttggggtatttttagattgttggatgttagttaggagacgaaacgaacgtttttgtagtatttattatgtgttttagaattttttagttttttgtttgattttttgtaataattttgcgaggtaggtggaatagttgttattttaaagtgaggaaattgaagtttaaagttttaatttttaaagggaggagttgaagaagagcgttagttttattttattttttcgtgtttttttagaaggaagaggttattttggtagttttttatttttagaattttgtttttttcgttttttttttattttgattgttggggtgtttatatataggggttagtaggaaatagagataaaggggagaaggtgtaaatacgagtagggaggaaaatttggtataagttggatgtgagaaggattggcgttgtcggggacgttagggttggtattaagaatagaggagacggtgaaatgtggttttgttttttttttagttttagaagggtcggtttgtttttatttttagagttcgttgattaatttaatagttgtttattaagtatttaatgtgtttttagtattttaatgggtattgggaatatagtagttattaaataaagttttttttttttcggagtttatattttaggggagtttttatttagcggttttaggtagttttttggaggtttagaatgagggtgttttttgtggtttttttggatacgtataagcgtagatatatatgcgtttatataagtgtgtatttatatgtatttgttcgcgcgcgtatacgtattgtttcgttttgtcgttttttttttagttaagtatttgaagtagaggcgtagcgcggatgattttgaatatgtgcgcgaggagtaggttaatttcgaggtagttattagcgttttaaggttcgcgtagtcggcggggcgcggggcgtagttgggcggtgtttttgggagggaaggaggttgcgcggagttttcggagttttagtttcgggtagttatatttgttcgcgttcgttttcgggtatagcggggttttttttttaggggtttgcggtggagtaggcggtgttaatttttttaggttttcgttggtttatattcgttattcgtttttgttttttagttttatagatttatacgggtttttttttttaggtatggttacgttgattgattttttttttttttattgatttttggggtttagtttggagggagaaaagtgggaaggtgtttatttgcgttagttttggtgtttgggtgagatataggtggaaaataattatagggttttttggaaatagtttcggttttggaattgtggtagaaatttggattcggtggtttgaaattaggttgaggagtatagttaggtagtgcggatttgtttttcggggttgattaattagatatttttttttttcgaagttttttggttggttgtttgtttgtttttaaggttagtaatcgtttattattattttttatatatgttttttttaaggcgaggttgcgcgtaggatggcgtgtatttttttttttttttttaattttttttatgtttttttaatttttggtagataattttttattaggttatttttttttttttgggttagttagtattttcgagaagtttttttgtggttatgtttatttgtttgttttttttaggagaaagagagagtggtagggtaggaggagggtttttatttttataggatagttggtttagttttgtagagtttttgtggttgggagggtgtgtgttagggttttatggggttagggtataggtaggttttttaggtaggtgggtttgttttagttttattttgtattttttgtggattaacgttaatagtaagagatttatatagggtttgtttttttttttttgttaggtataagagaattttgtatttgttttttgtttataatttcgttgaagaagtggagaggttaagtaattttaaggttgtttggaaggagagttgggttttgttttttgggagagttggaggatattttttttttgtggagtgtgaagggaggattgttttattttttgtttgttagtgtttgtttttgggagttagtgtattttattttttttaattttcgttggtttttaggggtacgtattattattttattttacgggtgaggagattgagttttagagagttgtttttgtatagttgtaaatatgggaggtcgaataggatgggttatattatttgtaattagttttatggttaataggaatttatttttttggtttttgtaaagcggtggataaggttgggaattaggatgttttttttttattttagttatgttagt

SEQ ID NO: 346 - DNA, 2315 bp, Artificial Sequence
  Description of Artificial Sequence: Synthetic polynucleotide
ttgtatttggcgtgaggttttttggttacggacgttgttggcgttatatttgtggtatttgaggtgaattgtttagatggaaacggtattattaggtaattggtaatagaagtttaaagttttgggtgttttaggttagaggaaggaaggaatgtaagggtttcgttttttttaatgttaggagcgtgtgtttatagttttagataggataatttattgtaaatttaaagtagaaaatatggtttaattttatttttgtggtatttttatagatggtgtttatttgttttggtagtgatgatcgatattgcgaacgttgtgttggtagtgtgtttaagggttttaattgaattatttcgatggagttgaaatttagttttattttatagaagagaaaattgaggtttagagagattaggtgttaagttttatgttaagtatagggaagtaaaaataggatatatttaatataaggtggttttaggaattagtggttaggatacgggaggtgtgttgagcgtagatgggtagatgtaagttgaggtggtttgttggagggttttggattttttagaaaagaggatattagttgtttagggagggaaggtttgagatggattttggttggtgtggattagtttatggtgtgtttgtaggtagggatattttgaatagatatgggttgaggggagtttgtgtggagcgtggttagtgaaggttgggttggtcggtagggttcgttggttatgggaggtttggtttgtagtagtagggtttattaaagatatggggatggatggttgatggataagatggttgatggatagcgttttagaaggtcgtaggtttgtttaggttgaggttagggagggttagggtttttagggaaggagagtaagttaggggagttttttgtatagaagattttttatttgaggtcgttttttaggagtttagttatttcgtggagagtttggcgttgattgtggaagaggtgatggacgtgcgtcgtgtgttggtgaaggtcgagatggaaaagtttttgtagaataaggagttttttagtagtttgaagaaggggaaggtgaggttgtttagacgtggggttacgtttttgttcgttgggttaggggcgggtgtcgagagggttagtttttaggattgtttgtttatgatttggttgggagttttgagggggtagtagggatagggcgggattttagggagttttggataaagcggggttttaattagttttttttgatagatttgttgttgttgtcgggttaagttttcgttgttttcgtggtcgtttagttgttttttttgtaagaggtgagttttttttttagttgttagtttataagggaaggaggaggcgagaaatttcggggtagtatcgtttatagaattttttgtgattttaggaatgttttagtatgttcgatggttgatgagtttataagatatggttagtacgaatgaggagttaaattttaaattgtatttaaattaaattaaatttaaatagttaagtaatttttagttttagttaagatggggtaataggtattttttatagttaagaataaataggatgtgaaataatggtttttaagatagtaggtaataaaaaggaaatataacggggtaagtttgttattattatagttattgtttggagagtttttaggttatgagttatagttgtcggattttttagatggaggaggttaggttgagaatttagggagattatagtagttcgagttcgtcgtgtagaattttagaggagagggttgcgtcgagaaagttttagagaaggtttttttttttgaaggaaatgattgaaggttgtagaatatttattttaaagtagagattggtagattatagttacgggttaaatttggttttcggtttgttttgtaagtaaaattttattggatatagttatatttatttattattcgtttagttacgtttaaaaggtttattttttggttttttatataaaaaatttatttttttttgttttaaagatttgaagggacggtgtttaggggtaggaatgagtaatatcggtttttatcggttataggtagaaatgttataatttatagggtattaattggaatgtatataaaggattcgttttattaacgtggagtaagtagtttaaagtgattgttgttttaggtttgattgatatattataaaagtaagatttgaaaggattaaattgtttataagtattttaattgattttgagaataaagtttaagaataagaattttttaaatattaataaaaaa

SEQ ID NO: 347 - DNA, 2315 bp, Artificial Sequence
  Description of Artificial Sequence: Synthetic polynucleotide
ttttttgttgatgtttaaaaaatttttatttttgagttttgtttttagaattagttaagatatttgtgaatagtttgatttttttaggttttgtttttatgatgtattagttaggtttagagtaataattattttgggttatttattttacgttagtgaggcgagttttttgtgtgtattttagttagtgttttgtgaattatgatatttttgtttgtggtcggtggaaatcgatgttatttatttttgtttttgagtatcgtttttttagatttttagaataagggaaggtaaattttttgtgtaaagggttagagaataaattttttaggcgtggttgagcgagtaataaatgggtgtggttgtgtttagtgagattttatttgtaaaataggtcgaggattagatttggttcgtggttatagtttgttaatttttgttttaggataaatgttttgtagtttttagttattttttttagagagggggattttttttgaggttttttcggcgtagtttttttttttggagttttatacggcggattcgagttgttgtggtttttttggatttttagtttgattttttttatttggggagttcggtagttgtggtttatgatttagaaattttttaggtaatgattgtggtgatggtaggtttgtttcgttgtgttttttttttgttgtttgttgttttgaaaattattgttttatattttgtttgtttttggttgtggaagatgtttattattttattttggttgaaattgggagttgtttagttatttaaatttaatttaatttaaatataatttaaaatttaattttttattcgtattaattatattttgtggatttattagttatcgaatatgttagaatatttttggaattataggaagttttgtgggcggtattgtttcgaggtttttcgtttttttttttttttgtgaattgatagttaaagggaaggtttattttttgtagaagagatagttgggcggttacgagaatagcgggaatttggttcggtagtagtagtaaatttgttaggagagattggttagagtttcgttttgtttaaagttttttggggtttcgttttgtttttgttatttttttagggtttttaattagattatgagtaaatagttttgggaattggttttttcggtattcgtttttgatttagcgggtaagagcgtagttttacgtttaggtagttttattttttttttttttagattgttgaagagttttttgttttgtaaaaatttttttatttcggtttttattagtatacggcgtacgtttattattttttttatagttagcgttaggttttttacggggtggttgaatttttaggggacggttttaggtaggaagttttttatgtaggaggtttttttagtttattttttttttttgaggattttaattttttttggttttagtttaaataagtttgcgattttttaaaacgttgtttattagttattttgtttattagttatttatttttatgtttttgatgggttttgttgttgtaggttaggttttttatgattagcggattttgtcggttagtttagtttttattggttacgttttatataaattttttttagtttatgtttgtttaaggtgtttttgtttgtaaatatattatgggttgatttatattagttagaatttattttaaattttttttttttgagtagttgatgtttttttttttggaaggtttaggattttttaataggttattttagtttgtatttgtttatttgcgtttagtatatttttcgtgttttggttattgatttttggggttattttatgttgagtgtgttttgtttttgtttttttgtgtttggtatagaatttgatatttgatttttttaagttttagtttttttttttgtaaaatggggttggattttagttttatcgagatgatttagttaaagtttttaaatatattgttagtatagcgttcgtagtgtcggttattattgttaaggtaggtgggtattatttatgaaggtgttatagagatggagttggattatgttttttgttttggatttgtagtgggttgttttgtttaaagttgtgaatatacgtttttggtattggggggagcggggtttttgtatttttttttttttttgatttgaggtatttagggttttaggtttttgttgttagttgtttgatggtgtcgtttttatttgaataatttattttaggtgttataggtgtgacgttaataacgttcgtggttaggagattttacgttaggtatag

SEQ ID NO: 348 - DNA, 2304 bp, Artificial Sequence
  Description of Artificial Sequence: Synthetic polynucleotide
cgatttttttgttttagtttttcgagtagttagaattataggtgtgagatatgtatttagttaattttttgtgttttttagtagaaacggggttttattatgttggttacgttggtttcgaatttttgattttaagtgatttatttattttcgttttttaaagtgttgggattttaggagtgatttcgtatgtttagttattaataaatatttattaagtgtttattttgtttttaagagtgttgggaatttagtagtgaataaaataaatattttttttcggggattttgaatttaagtttagttagggattattttattaagagattaagttaatatttaatttttttatagatttagataggatagtattttaatttttcgttgatttgtttttttagattttagattatgggtattgtagatttttgtattttttgtagaggtagggttttattattattagagattttattattatttttatgtgaagggaaatagtgtttttttagtagataacgttaaattagttattagacgtgggttatggtgggtttgtcgtgattgttataaatacgttttatcgaagtttgttaggggacgttatatttttttttagaaagtaagaaatagagaaaggtttttttttgtttcggattgttttttttttagttttaagaaatttttttatagttgttattttattttggtttgttttttgagtaagaaaattgttggaaagagtttgttatttatttagattataattagggagtttgttgttatttaggaagggttttaaaaaatttttttgatttattgtgagtgtaaatttttgatatttttgtatttttttatttattttattttgattttatatatagtgcgattttgaaaggaagcggtgtttttggagaggtagaaaaattttggaaaataaggtttatgacgttggttattagtacggggttgttgtttgttgtgtgatatgtttaggggtgacgcgtttttcgaaagagatatttggtagagaaggtacgggcgcgaagttcggttgcgggagagttgggagtttgaatgtcgttggttgtcgtttatagtaggttttttttgagtatcgtggggaggtagtgatattcgttggtttcgtagcgatatttcggtagttgttttgttttttagtttggacgtgataggtgtgttttggaggatagttagaggaagataggtaagttatattggtttttttcgaggttatattttcgtttaggttaggttgtttttaatagatatttttcgcgggcgttgaggtagttagttttattgttatttagataatttttttttcgttttgttaattttgttttttttttaagaatgtttaaattttttatttaagcgatgagagggaaatatttgagttgtatatttaaggagatgtgggtttttattttggttttgcgatatattattggtgggatcgtgggtgagttatttaatttttttagtttttagtttttttatttgtaaagtgggttttagtatacggtttaattgaggtaatatacgttgtttatgttagttgttgtttttatgtcggttttgtttaggtttttttatggtaataggataggagttttttgtttgtgcgttagttttttattagcgtgggaatgttgtgaggagggggcggaattcggtgtagtaagggtttttgttcgtattttttattttttttttttttttttttttgagattgagttttgttttgtcgtttaggttggagtgtagtggcgcgattttcgtttattgtaagtttcgtttttagggtttacgttatttttttgttttagttttttaagtagttgggattataggcgttcgttattaagtttagttaattttttgtatttttagtagagacggggttttatcgttttagtcgggatggtttcgattttttgatttcgtgattcgttcgtttcggttttttaaagtgttgggattataggcgtgattatcgcgttcggttcgtattttttattaagaattagtaattacgggttgggcgtggtggtttacgtttgtaattttagtatttagggaggttaaagtgggcggattacgaggttaggcgatttagattattttggataatacggtgaaatttcgtttttattaaaaatataaaaaatttggtaggcgtggtggcgggcgtttgtagttttagttattcgggaggttgagggaggagaatggcgtgaatttgggaggcggagtttgtagtgagtcgagatggtatta

SEQ ID NO: 349 - DNA, 2304 bp, Artificial Sequence
  Description of Artificial Sequence: Synthetic polynucleotide
tggtgttatttcggtttattgtaagtttcgttttttaggtttacgttattttttttttttagtttttcgagtagttgggattataggcgttcgttattacgtttgttaaattttttgtatttttagtagagacggggttttatcgtgttatttaggatggtttggatcgtttgatttcgtgattcgtttattttggtttttttaagtgttgggattataggcgtgagttattacgtttagttcgtggttgttggtttttaatagaagatacgggtcgggcgcggtagttacgtttgtaattttagtattttgggaggtcgaggcgggcggattacgaggttaggagatcgagattatttcggttaaaacggtgaaatttcgtttttattaaaaatataaaaaattagttgggtttggtggcgggcgtttgtagttttagttatttgggaggttgaggtaggagaatggcgtgaattttggaagcggagtttgtagtgagcggagatcgcgttattgtattttagtttgagcgatagagtaagatttagttttaaaaaaaaaaaaaaaaaaaaaatagaagatacggatagaaatttttgttatatcgagtttcgttttttttttatagtatttttacgttagtgaaaaattgacgtataggtagagaatttttattttgttgttatggggagatttaggtagagtcggtatgaaagtaatagttgatatgaataacgtgtgttattttagttaagtcgtatgttggagtttattttatagataagaaaattgaggattagagaagttaagtgatttatttacggttttattaataatatatcgtaaggttagaatggaaatttatatttttttgagtgtgtagtttaagtgttttttttttatcgtttgaatgaagagtttaaatatttttgaaaggggaatagggttggtagagcgagagaaaaattgtttgggtgatagtgaagttggttgttttaacgttcgcggaggatgtttgttagaagtaatttaatttaagcgagggtataatttcgagggaggttagtatggtttgtttgtttttttttgattgttttttaagatatatttattacgtttaggttggaaaataggatagttgtcggagtgtcgttgcgaggttagcgggtgttattgtttttttacggtgtttagagagagtttgttgtgaacggtagttagcgatatttaggtttttagttttttcgtagtcgggtttcgcgttcgtgttttttttattaagtgtttttttcgggaggcgcgttatttttgagtatgttatatagtagatagtagtttcgtgttgatggttaacgttataagttttattttttagagtttttttatttttttaaaaatatcgtttttttttaaaatcgtattatgtgtaaaattaaaataagatggatggggagatgtaggaatattagagatttgtatttatagtaaattagaagaattttttaaagttttttttgagtgatagtaggttttttgattatgatttgagtgaatggtagattttttttagtagtttttttatttaagagataggttaggataaagtaatagttgtaaagaaattttttagagttgagagaaagatagttcggggtaggagaaagtttttttttgttttttattttttaggggagggtatggcgttttttggtagatttcggtgaggcgtgtttgtggtagttacggtaaatttattatgatttacgtttgatggttgatttaacgttgtttattgaaagggtattgtttttttttatatagaaatgatggtaaagtttttggtagtggtgaaattttgtttttataaaaggtgtaaaaatttgtagtgtttatggtttagggtttgagggagtagattaacgagaaattaaaatattattttatttgagtttgtaggagaattgagtgttgatttgattttttaatagagtgatttttgattagatttgagtttaaggttttcgagggaaggtatttattttgtttattgttaagtttttagtatttttgggaataaagtaggtatttagtaagtatttattgatggttgggtatgcgggattatttttgaaattttaatattttgggaggcgaaggtgggtggattatttgaggttaggagttcgaggttagcgtggttaatatggtgaaatttcgtttttattaaaagatataaaaaattagttgggtgtatattttatatttgtaattttagttattcgggaggttgaggtaagagaatcg

SEQ ID NO: 350 - DNA, 2470 bp, Artificial Sequence
  Description of Artificial Sequence: Synthetic polynucleotide
gtggaatatattttttatatagttatattatttaaaatttattgtttttaagtttttatttaaatgttttttcgtgaagttatttttgagttttttttaaaattgtagttttttatttttgtattttttattgttttttatttttaatttttgttattgtagttagaattatttgatatatagtttttattttattggttttttgttatgtttttttttataagaatttgaagtttattaggtcgggagttttgtttgttgtgtttgttgttattttttagtgtttaaaattgtttggtatatagtaggtatttaataatttttgaattagtgaaaattagatggtggtttggtatttttatataggaatgagttaggtggaaattatttaggatataagtagattttgaagtgataaggaagggttattataattatgtggggtttattttgtttttttttgttttttttttttaggtttagtaatagttttattaaggattttatgaatattaaagtttatatttatatgttgttagaggtgagagtagtttattttattattagattttgtgtttagggtggtgatttgaagaaggaagagagcgaaagaagggaaggattatttttttttttaaattggagttaagggagggaggttagagtaagtttgggggcgtaatttagatttagtttttgtttaattttttttgtttttttttttaggggtttagagaattataaggtttgtagaattttttagagaagttttattattgattttttttttttatttttagatattaaagagtttgaatgtttttgagttatatggtttttttttttttttataaattttgttagttgttacgggggtttgtttttagggtataaagttattgagagatttagagatttagtttttttgtggaatttttaaaatgttttagtagttttgtttttagtttgttgtttggtagtatttgttagttgattttatgtattgtttttttttttgttattttggtaatttgggttttttattttatttttttttttatttttttttttagacgttattttttgaattgttatagagaatgggttaatttatggtggaggtttgtttatttttataataattaaagggttttaaggtttacgtttttatatatttaattattttttaggtattttaaattatatttaaattttaatttagttttattttgttttagtttttgtttgtaagtgttttagtttttaatgggtatagatttggatttcgttttttttagtcgggtttttattttaggttgagtttagttatcgttaattaatgtagagttaggttttttttttttttaattttggtcgtagtttaattttgttttttgaaagtatttcgtttttgttatttaatgttttttcgtgtgtttgatagttattttgtttttttattttcgttgtgttttaaattcgtttttatttagttttatggttttgtttaatcgtagagttgttttgttcgtttacgcggagtttagttcgatttattttcgtcggttgttacgtttatttttatataagttttgttttcgttgagtagtatggcgtgcgatatcgtttttttggtgttttggtaggggtttagaagtttttcgttcgttaattagagaaaaatagggttatttattttcgtttttgggggttgttttttattaattttatgtaagttaattagtgtgaggtagattttcgttttttcgatataggtttcgagtttttttagttgtttatagttcgttagtttttgagttaatcggcgtggagtatcgtgaaggtcgaacgcgttttttcgggattttaggggtcgtgagcgttttattatttttttttacgttaattacggtatagttttgtagggaagggttcgttttttaatttttcgaggttttgcggtcgattaatagcgttttggttaattagcgagcggcgggatattgggtttttttttttcgggtttacgtgagttgtagggaaacgtaggggcggtttttaggtgttgtcgtcgttatcgttattattatttttatcgtcgtttcggaatttaggtttggggggcggtggggtcgcgtatggagttttcgtttttcggagttgttaatattgttaacgttatcgttacgttatatataggtgagttttgggtttggagggtggagggtttagttcgtgattttacgtatttttttcgttttcgcgtagaggatgtggtttggtcggtggtttgttggtgttcgatttttcgtcgttattattacggttggtggatttgcgtgtggtattgtttaagtttttcgttttttatagtggatttgatcgtggtttaatttttttttttcgttgtataatggatcggtttgcgtgtttatgtttttttttacgttaatttagggtggattcgttt

SEQ ID NO: 351 - DNA, 2470 bp, Artificial Sequence
  Description of Artificial Sequence: Synthetic polynucleotide
ggacgagtttattttaagttggcgtggggaaaaatataagtacgtagatcgatttattatataacgggagggggaggttaggttacggttagatttattataagggacgaagggtttgagtaatgttatacgtaggtttattagtcgtggtggtggcggcggggagtcgaatattagtaggttatcggttaagttatattttttgcgcgggggcgggaaggatacgtggggttacggattgggttttttattttttaggtttagagtttatttgtgtgtagcgtggcggtggcgttggtaatgttggtagtttcggggggcgggggttttatacgcggttttatcgttttttaggtttgggtttcgaggcggcggtggaggtggtggtggcggtggcggcggtagtatttagaagtcgtttttgcgtttttttatagtttacgtgggttcgaggaggaggagtttaatgtttcgtcgttcgttgattggttaaagcgttattaatcggtcgtaaggtttcgaggggttgggggacgggtttttttttatagagttgtgtcgtgattggcgtaaggggaaatgatggaacgtttacggtttttggagtttcgaggaggcgcgttcggtttttacggtgttttacgtcgattggtttaaggattgacggattgtgagtaattgaaaaggttcggggtttgtgtcgggggggcgggggtttgttttatattgattggtttatatgggattgatggaagatagtttttaaggacgggggtgggtggttttgtttttttttgattggcggacgagggatttttagatttttgttaaaatattaagggggcggtgtcgtacgttatgttgtttagcggaagtagggtttgtatagaaatgggcgtagtagtcggcgggagtgggtcggattgggtttcgcgtaggcgggtagggtagttttacggttagataagattatagagttgggtaaagacgaatttagaatatagcggaggtaggagggtaggatggttgttaggtatacgaaagagtattgagtggtagaaacgaaatgtttttagagggtagggttgaattgcggttagagttaaaaaggggaggaatttggttttgtattgattggcggtggttggatttaatttagaataggggttcgattagggagagcgggatttaggtttgtgtttattggaagttggaatatttataagtaggggttaagataaggtagggttgagttagggtttgggtgtaatttggggtatttggggaatgattgggtgtgtgaaagcgtaaattttagggttttttgattgttgtgggaatgaataaatttttattatgaattggtttattttttatggtaatttaaagggtggcgtttaggaaaaggaatggaagaaagggtgaggtggggggtttaggttgttaagatgatagaagagagggtagtgtataaggttaattggtaaatattgttaggtaataggttggaggtaggattgttggggtattttggaggttttatagagagattggatttttgggttttttagtaattttgtgttttaggaataggttttcgtggtaattagtagggtttatggggaaaaagaagggttatgtgatttaaaggtatttaggttttttaatgtttgaggatggggggaagaagttaatggtgaggtttttttgggaaattttgtaggttttgtagttttttaagtttttgaaaaagaggatagaagagattgaataaagattgggtttgggttacgtttttaggtttgttttgattttttttttttgattttagtttagagggaaagatggttttttttttttttcgtttttttttttttttaggttattattttaaatatagagtttggtagtggggtgagttgtttttatttttagtaatatgtggatatgggttttgatatttatggagtttttggtgaggttgttgttgagtttagagaaaagaaataagaaagggtaaaatgggttttatatgattatgatgatttttttttattattttaagatttatttatattttggatgatttttatttggtttatttttatgtggaaatgttaagttattatttggtttttattgatttaaagattattaaatgtttattgtatgttaggtaattttaggtattgggagatagtagtaaatataataaataaaattttcggtttgatggattttaaatttttgtaaagaaagatataataaaaaattaatggaataaaagttatgtgttagatggttttaattataataataaaaattaaaaatgagagataataaggagtataggagtggggggttgtaattttaaagagggtttagggatggttttacggagaagtatttgagtaaagatttaaagatagtgaattttgagtagtgtggttatatggaggatgtgttttat

SEQ ID NO: 352 - DNA, 2470 bp, Artificial Sequence
  Description of Artificial Sequence: Synthetic polynucleotide
tttaaaaagttttgtaaattaaaagtttgggggtaaatttatttggtagtaaattttgatttgaggttatttatagtttatattttgtattttttttatttagtatgaataagtatgtaagttttattgtatgtttgattttagtatgtttttttagattttttgggggtgtttacgtatgtcggtgggggaaagagattaatttttaaatattattttaaatagttggttttattgtgtttgtttgggtagtatatatattaaaattggaatgatttttgtatagggatgaaatgtaaattcgtgaagtatattgtattttttttagtatatattatttttggtaatattttttttttttttttgagagggagttttgttttgtcgtttaggttggagtgtagaggcgcgatttcggtttattgtaagtttcgtttttcgggtttatattatttttttattttagtttttttagtagttgggattataggcgtgtgttattacgttaggttaattttttgtatttttagtagaggcggggttttattgtgttagttaggatggtttcgattttttgatttcgtgattcgtttattttcgtttttttttcgaagtgtcgagtgttgggattataggcgtgagttattgcgttcggttttcgttttttttttttagattgattttattatttgtttagtaaaggagaattttttggtagaatagtttttaagaataaggtaaataattaattttatataggtttttattaatgtatagttgttgattgtgattggttttcggtaatttggattttataatttggataaggggataaataattgtttgttttttattattttttttgaatttgaatagaatttttttatttttatagttttttagtttttttttttttttttttgagacggagtttcgtttttgtcgtttaggttggagtgtagtggcgcgattttggtttattgtaaacgttgttttttaggtttaagttatttttttgttttagttttttaagtagttgggattataggcgtatgttattacgttcggttaatttttggatttttagtagagacgggggttttattatgttgattaggttggtttttaacgtttgattttaggtgattcgttcgtttcggtattttaaagtgttgggattataggcgtgagttattgcgttcggttttttatagttttttagttttttaaaatttgaaaaattttgtaaagatatatttgggttaaagggtttagataacggattgtggtttttaagtatttacgttataggttattgagaggatcgatttagttattagatgtaaaatgttgggattagtgtttggtaaaggaaaattttgtatagttgtaggtttttattatatataatagtatcgttaacgaatgttattataatatttatttagcgtttattaagtgtttattttatataaattttgagaatataacgtgaaggtgaattgttgattaaagtttggtttttttcgtttcgtttttttgcgaaaatgttttaacggtaggaggttacgcgagcgttggacgcgttttttttcgcgagttttttttcgaggtttttcgggttttttcggttattttcgttcgggcggtgcgcgttttcgttgttttcgttttcgttttagagaggtagggtttttcgagtttgttagtttcgcggtcgtaattaatttcgggtcggagtgtttcggttcggttagtttcgcggcgtgagggaaggggagtttagtagtttttcgcgcggggtttaggcgtcggcggtagggcgggttttttatcgttagcgtgttagtttcgtttttatttattagtgtgttagtttcgtttttttttacgtcgtcgcgcgttcgggggcggggtttggcgcgtatcgttcgcgtacggcgaggcgtttgttgattggttattggggttcgggttttttcggcggagcgcgtttttttttagatttttcgttagtaggagtcgcgcggtagatgcggtgtttttaggagtttcgttcgatagaacggttgggttttgtcggttgtcggtatgtcgcgatagagtattttgtatagttttttttttaagttttcggcgttgagtgatgttaataaggtttcggttagggttttacgcgaaggcggtcgtgtcgtcgttgttttcggggtttttttttttttaggcggggatgcggtttggagcgaggttgggtttgggtttaggtttttggcgcgtttcgcgttatcgtttaaggcgaagaattttaacggagggttgcggagatcggtagcgtttgttgtttttattaggtagcggggtgggggtggggtcgaaggcgggggtatagcggcggggcgtttggaattcggcgaggggaggttcgtatagggggttgggggggtgtacggtttggttttgggttcggagg

SEQ ID NO: 353 - DNA, 2470 bp, Artificial Sequence
  Description of Artificial Sequence: Synthetic polynucleotide
ttttcgagtttagggttaggtcgtgtatttttttaattttttgtgcgagttttttttcgtcgggttttaagcgtttcgtcgttatgttttcgttttcgattttatttttatttcgttatttggtgggggtagtaggcgttatcgattttcgtagtttttcgttgaggtttttcgttttgggcggtgacgcggagcgcgttaagggtttgggtttaggtttagtttcgttttaggtcgtattttcgtttggggaaggagaggtttcgggggtagcggcggtacggtcgttttcgcgtgaggttttggtcgaggttttgttggtattatttagcgtcggagatttggggaagaagttgtatagggtgttttgtcgcgatatatcgatagtcggtaaggtttaatcgttttgtcggacggagtttttaaaagtatcgtatttatcgcgcggtttttgttggcgggaaatttggggggaggcgcgtttcgtcggaggaattcgggttttagtggttaattaataggcgtttcgtcgtgcgcgggcggtgcgcgttaggtttcgttttcgggcgcgcggcgacgtggggaagggcggggttggtatattggtgggtaggggcggggttggtacgttggcggtgaggggttcgttttgtcgtcgacgtttgggtttcgcgcggggaattgttgagtttttttttttttacgtcgcggggttggtcgggtcggaatatttcgattcggggttagttgcggtcgcggggttagtaggttcggaaagttttgtttttttggagcggaagcgggaatagcgggggcgcgtatcgttcgggcggggataatcggggggattcgaaaggtttcggaaaggggttcgcggggagaaacgcgtttagcgttcgcgtgattttttgtcgttagagtattttcgtaaggagacggagcgaaagggattaaattttagttagtagtttatttttacgttgtatttttaagatttgtatagagtaggtatttggtaaacgttaaatgaatattgtaatagtattcgttagcgatgttgttgtgtatggtgaaagtttgtagttgtataaagtttttttttgttaggtattgattttagtattttatatttggtaattaaatcgatttttttaataatttgtgacgtaagtatttaagggttatagttcgttatttgagttttttgatttaggtgtgtttttataggattttttaaattttagaaagttaagagattatgagaggtcgggcgtagtggtttacgtttgtaattttagtattttgggatgtcgaggcgggcggattatttgaggttaggcgttgaagattagtttagttaatatggtgaaattttcgtttttattaaaaatttaaaaattagtcgggcgtggtggtatgcgtttgtaattttagttatttgggaggttgaggtaggagaataatttgaatttgggaggtagcgtttgtagtgagttaaggtcgcgttattgtattttagtttgggcgataagagcgaaatttcgttttaaaaaaaaaagaaagaaagttaagaggttatgagaataaaaaggttttatttaaatttaagaaagatagtggaagatagataattgtttgtttttttatttagattgtgaaatttagattgtcggaaattagttataattaatagttgtatattggtaaaaatttatgtaaaattagttgtttgttttgtttttggagattgttttgttagaaggtttttttttgttaggtaagtaataaaattaatttaaaaaaaaaaggcgggggtcgggcgtagtggtttacgtttgtagttttagtattcggtatttcggggggggggcggaggtgggcggattacgaggttaggagatcgagattattttggttaatatagtgaaatttcgtttttattaaaaatataaaaaattagtttggcgtggtagtatacgtttgtagttttagttattggggaggttgaggtaggagaatggtgtgaattcgggaggcggagtttgtagtgagtcgagatcgcgtttttgtattttagtttgggcgatagagtaagatttttttttaaaaaaaaaaaaagaatattgttaaaggtggtatgtgttaagaaaaatatagtatgttttacgaatttgtattttatttttgtgtaggggttattttaattttggtatatgtgttatttaagtaagtatagtgaaattaattgtttgagataatatttgagagttggttttttttttttatcggtatacgtaaatatttttagagagtttgggggaatatgttgaaattaaatatgtagtaaaatttatatgtttatttatattaagtagaaagaatatagaatatagattataaatagttttaggttaaaatttgttattaaatgagtttatttttaaatttttggtttatagagttttttgga

SEQ ID NO: 354 - DNA, 2470 bp, Artificial Sequence
  Description of Artificial Sequence: Synthetic polynucleotide
atatattatatcgtgtatgtaatgtataagtatttatttcgtttgtttggggttttgtttgtttttgttgagttcgatttttttatttgtcgtttggtttttgttttacgttttagtgttattgagattaaggagagaacgaatttgtcgttgattgggtagagcgagcgcgtggatcgcggttatcgttcgtttattattcgcgcgtatttgggttggtatcgggcgaagaatcgtgcgggtttgggatttgggggtttagagggagcgagtttttgcgcgggcgttcggttcgtaggtttcgtaggtttaggggcgtgtttcgtttttatttttatttcggatttcggtttttttttttagatagcggttttttttatttttggttttcgtaggtcgttagtagttcgcgttaggtttcgtcggcgtttttagggttttttagatcgcgtagattttgatattttcgtttggttttgggttttgggagttgagagtcggttagggttttgttcgtattttcgggcgtttagtttcgggtttgtttttcgcggacgttttaattttttcggtcgaatggatggtggtgcgcgcgcgttttatttcggcggtgtcggttttttttgttgttaaaattagatttaaatttttgtatgggattcgtttttgggtttttatttcgtgcgtttagtaaatagtgggtgagttatgaagatgtgcgagttagtcggatttttttcgttaggcgcggattcgttgcggttagagaatttagtttgcgttagttcggttcgttcgcgaagttacgggttttattgacgcgattttttaagacgtgggggttattatgggtagaggatatcggttcggagttagattacgggttttataagtattagattataagtagcgtcgttattgagagtcgttcggaattcgtttagtatgtcgggttttttagttagggtttggtgtacgtggtcgagggttttggaagtttcgatggtttaggaggagtaggcgggcggggcggcgggtgtcgttggtcggtagagagtttcggtttgatttagcgtaggtttggtgcgcgtagagaataattttaagcgtatcgacgttcgcgagttttttttaaatatcgaacgggatttagagttcgagtttataggcggcggtcgggggagggagtagggtgttggtcgtcgttcgggagtgttcgcgttttgggtgatttttggaaggacgtggggtttaaatttcggttggggttgggagagtagtttttagaggtttttcgcgggattttttgtcgggcgggatcgtggttttataggagaagtgggtggtaagttttgtttggcggaaagtagtcgtttttttttttttgggtttggggcggcgttttttatttttgtttttcgttttttatttttgtttttcgtcggttatattttttgttttttggattttaagcgtttcgcgcgtcgaggagtttagcgttagtggcggcggttaggagagattcgggtgttaggaaagatgggtcgtttgggggatagtagggagttcgggggaaacgtaggcgtcgggtatagagtcggtatcggcgtttttagttttgtcgaagatcgcggtcgggtttggttcgcgggaggggttttggcgtcggatttgtttcggttttgcgtgggcggtttcgtcgggttttgtaggagcgacgcgcgttaaaaggcggcgggaaggaggcggggtagagcgcgttcgggatttcgatttggacgcggttagttggagaggcggagcgtcgggaggagattttggtttcgtcgcgattcggtggttcgcgttgttttttcgcgcgtcgggttaaaaaggcgttaacgttcgcggtcgtttatttttcgcggcgtttttttttttcgcgtttatataattcgtttaggggtcgggtagttcgttttgttttttcgttcgcgtattcgttcggaggttcgcgcgttcgcgaaggggacgtagcgaaatcggggttcgcgttaggttagtcgggacggacgtcgatgttcggggttgcgacggttgtaggtaggaggtttagggtcggggggcggttcggtttcgcgggcgggggttggagcgtagcgttgggtaggtatttgggttcgtagtttcgaagttgggaggtgaggggagagcgatcggggacgagttgggataaggcgatataggggttttttcggagttggatcggtttttgggatttggcgttcgcgagaggttggagcggttagagtttagtttgcgaggagacgcgggttttgtttttagcgtcggtcgtttttggcgttaaagatagtttcgtaggggtttcgggagggttttttttttgttgttttttttttatttcgggtttcgagggtcgttgggagggtaatttcgggaagaggtcggggtgcggggcgcgggtgtaggt

SEQ ID NO: 355 - DNA, 2470 bp, Artificial Sequence
  Description of Artificial Sequence: Synthetic polynucleotide
atttgtattcgcgtttcgtatttcggttttttttcggggttatttttttaacggttttcggagttcggggtggagaggggatagtaggaggagggttttttcggaatttttgcggggttgtttttggcgttaaaggcggtcggcgttgagggtaggattcgcgttttttcgtaggttagattttggtcgttttagtttttcgcgagcgttaagttttaggggtcgatttaatttcgagggagtttttgtgtcgttttgttttagttcgttttcgatcgttttttttttattttttagtttcggagttgcgagtttaggtgtttgtttagcgttgcgttttagttttcgttcgcggagtcgaatcgtttttcggttttgggttttttatttgtagtcgtcgtagtttcgggtatcggcgttcgtttcggttggtttggcgcgggtttcggtttcgttgcgtttttttcgcgggcgcgcgagttttcgggcgggtgcgcgggcggggaggtagggcgggttgttcggtttttaggcgggttatatgggcgcggggaggggaggcgtcgcggggagtaggcggtcgcgggcgttagcgtttttttagttcggcgcgcgggaaggtagcgcgggttatcgagtcgcggcggggttaaggttttttttcggcgtttcgtttttttagttggtcgcgtttaagtcggggtttcgggcgcgttttgtttcgtttttttttcgtcgttttttggcgcgcgtcgtttttgtagagttcggcgaggtcgtttacgtagggtcgaagtaggttcggcgttagggtttttttcgcgggttagattcgatcgcgattttcggtagagttggggacgtcggtgtcgattttgtgttcgacgtttgcgtttttttcggattttttgttgttttttagacggtttattttttttgatattcgggttttttttggtcgtcgttattagcgttgggtttttcggcgcgcggggcgtttggaatttaaggggtaggggatgtggtcggcggggaataggggtgaggggcggggaataggggtgaggggcgtcgttttaggtttaggaggaggggaacggttgtttttcgttaagtagggtttgttatttattttttttgtggagttacggtttcgttcggtagaggatttcgcggagagtttttgggggttgtttttttaattttagtcggagtttgggttttacgtttttttaggggttatttaggacgcgaatattttcgggcggcggttagtattttgttttttttttcggtcgtcgtttgtgggttcgggttttggatttcgttcggtgtttggaaggagttcgcgggcgtcggtgcgtttggagttgttttttgcgcgtattagatttgcgttaggttaggtcgaagttttttatcggttagcgatattcgtcgtttcgttcgtttgttttttttaggttatcggggtttttagggttttcgattacgtatattaggttttggttaggggattcgatatgttgggcgagtttcgagcggtttttagtggcggcgttgtttatggtttgatgtttatggggttcgtgatttggtttcgaatcgatgttttttgtttatggtgatttttacgttttggaaagtcgcgttagtgaagttcgtggtttcgcgagcgagtcgggttggcgtagattgggttttttggtcgtagcgggttcgcgtttgacggggagggttcggttgattcgtatatttttatggtttatttattgtttgttgggcgtacggggtggggatttaaagacgaattttatgtagaggtttgggtttagttttggtaatagaaaaggtcggtatcgtcggagtaggacgcgcgcgtattattatttattcggtcggggaggttggggcgttcgcggggagtagattcgaggttgggcgttcggaggtacgagtaggattttggtcggtttttagtttttagaatttagggttaggcggggatgttagggtttgcgcgatttggggggttttagaggcgtcggcggggtttggcgcggattattagcggtttgcgggagttaggggtggagggggtcgttgtttagggaagaggatcggggttcggagtgggggtgagaacgaggtacgtttttgagtttgcgaaatttgcggatcgagcgttcgcgtaggagttcgttttttttgggtttttaggttttagattcgtacgatttttcgttcggtgttagtttagatgcgcgcgggtgatgaacgggcggtggtcgcgatttacgcgttcgttttgtttagttagcggtaaattcgttttttttttgattttagtggtattggagcgtgaggtaagggttaggcggtaggtagaggggtcggatttagtaaaagtaaataaaattttaagtaaacgaaataaatatttatatattatatatacgatataatatat

SEQ ID NO: 356 - DNA, 2470 bp, Artificial Sequence
  Description of Artificial Sequence: Synthetic polynucleotide
aaaattgaatatttgagaatattggatttatatttttgagggtaataatttgttagagttgagtagttgttttttttagttatggtatggatattttaatttgttattttttttattattttttattgttttatataaggttagttttatttatttgttttatttgtttggtttttgtagttatttgaatttgtaaatattatttagattttttttgttttttattaaagtttattttgttttgttttaagttttttattagtgttttaaagtaagagttaggtaatttgattaaatataggttttttaatatgtgttttttggagatagtattttaatagaaagagatgattttgtaggtagaaattataggtattattggattataattaggatggtaattgtttgttttattttttttgttattttgacgtagttatattttattgttttaaagtagattaaaggaattggttttatggtagaataatggacgttggttttatgtatgaaatttttttaagttgtatttttatagattattttagttttaaaagatttaaagttattacgggtttttttgatttttttattttttcggaggttttaggatattcggtttgacggtatttttttttatttgttttcggggttcgttttgcgttgggtagttgcgtttaaggagcgcgcgtatttagtatgagtttattttttatgggcgtttttagaggttcggtcgggtcgcgtatattaagcgtagtaagtttttgtattaatggttttcgcggttgggcggggcgcggtcgtttaaaggcgttgtttttttggaagttttgtttttattttagcgtttgagagtttgtagtcggttgggaaggtttttttggttcgtttggttttttcggggaagaggttaatattcggtatacgcgatttacggtagaggggagttttgggcgcgtagaattggttgcgtttcgtcgagagttttttgtgggtggggagagtttttttatttttttgttcgtttgagcgtttagagtttagggtcgtcgatcgtagtatttttcgatttgttgtatcgagggttcgcggtttttgtgtgcggtttttatcgttgttggaggcggtcgtaggcgaatcgtcgggtcgttagttacgattcgagttaggtattttttcgtttttgggatcggggtcgaaggttaattatattgtagttaggttttgcgattggacggtagtgagagtcgattggtcgtcgtcgcgagtttcgggtttttttttttttttttttgttttaattttagcgtttaagttttaggttaatgagatagcgttttatagacgtttttttttcgtttttttttttttattttggagagggaggggaagttttgattggttagattgttttcggaagtttttttttttttattaattatcgaaggaggtacgtttttagcggagttttttagttaattataaagcggcggcggcgtttagtcgtgtagttttattagcgtttttgggttttatcgtttttaattttttaagttttttcgtaagggtcggcgattttgattggttattgttgttattgtcgaatgttttttttagttagttatcgaataaggcgaatttatttttttcgttcggttattttcggtatttttcgttttttgggcgtggttttttagcgttattttttaattggttttttaggttgatcggtttttttcgggaggagtcgtaaataaacgacgttcgtgattggtttcgttcgggtttcggtttttagtcgaagcgggcgagcgtggggttcggtcggcgatttttagacgtttgttacgcgggcggcggggcgttgggcggtgtaaggttgggtgggggaggaaggaggtggaggacgagtaggaggggggaggaggagtggggaagtgtaaggcggttgcgtagatagcgttttttatatagagtagtttttgattcgggcgaatgcgggtttgtgtcgtcgtcgtcgtcgtcgtcgttcgggttaagtgataaaggaaggaaggaagcgaggaggagtcggtttcgtagtcgttgatagggttttgggttggggtaaagcgcggatattttttgagcgggtatcgagtagagtcgaggggcgggagggcggtcgagttgttgtcgcggacgggggagggggtttcgagggacggaagcggttgtcgggtttttatgttttcggcgaatggggaatagtcgaggagtcgttgtttggggtttgaagggagttgttttcgttatcgttatggtcgttggatttagtcgtcgtttgtagttgtttttggcgtaatgaggagaggagtcgtcgttatcgttatcgttcgtttttgattgattcgcgatttcgtcgttttttagttcgtcgggtttttgtcgttagttcgtcggatttcgcggtttgtcggagttgtag

SEQ ID NO: 357 - DNA, 2470 bp, Artificial Sequence
  Description of Artificial Sequence: Synthetic polynucleotide
ttgtagtttcggtaagtcgcgggattcggcgggttgacggtaggggttcggcgaattagagggcggcggagtcgcgagttagttagaggcgggcggtggcggtggcggcggtttttttttttattgcgttaggagtagttgtaggcggcggttggatttagcggttatggcggtggcggaggtagttttttttagattttaggtagcggtttttcgattgttttttattcgtcggggatatgggaattcggtaatcgttttcgtttttcggggttttttttttcgttcgcggtaatagttcggtcgttttttcgtttttcggttttgttcggtgttcgtttaggaagtgttcgcgttttgttttagtttagagttttgttagcggttgcggggtcggttttttttcgttttttttttttttttgttatttggttcgggcggcggcggcggcggcggcggtataagttcgtattcgttcgggttaggagttgttttgtgtgaggagcgttgtttgcgtagtcgttttgtatttttttattttttttttttttttttattcgttttttatttttttttttttttatttagttttatatcgtttagcgtttcgtcgttcgcgtaataggcgtttgggaatcgtcggtcgagttttacgttcgttcgtttcggttgggagtcgaagttcgaacggagttaattacggacgtcgtttgtttgcggtttttttcggaaaaagtcgattagtttgagaaattaattagaaagtgacgttgggaagttacgtttaaagagcggaaaatgtcgaaggtagtcgaacggaaagggtgaattcgttttgttcggtggttggttggaggagatattcgataatggtaatagtggttaattagagtcgtcggtttttacgaagaggtttgaagagttgaggacggtgaaatttagagacgttggtgaaattgtacggttgggcgtcgtcgtcgttttgtgattggttggaaaatttcgttgggagcgtatttttttcggtgattggtgaagagaagggggttttcgaggatagtttggttagttaggattttttttttttttttaaggtggggagaagaaagcgaagggagggcgtttataaagcgttgttttattggtttgaagtttaggcgttggagttggggtaaaagggagagggagggagttcgaaattcgcggcggcggttaatcggtttttattgtcgtttaatcgtaagatttagttgtagtgtgattggttttcggtttcggttttaggagcggggagatgtttgattcgggtcgtggttgacgattcgacggttcgtttgcggtcgtttttaataacggtggaaatcgtatatagggatcgcgggttttcggtgtagtaaatcggaaagtgttgcggtcggcggttttgggttttgagcgtttaagcgagtagaggggtggaggggttttttttatttataggaggttttcggcggggcgtagttaattttgcgcgtttaaggtttttttttgtcgtggatcgcgtgtgtcgagtgttggtttttttttcgaaagggttagacggattaagggggtttttttagtcggttgtaagtttttagacgttaaaatgggaataaagtttttagaaaggtagcgtttttgggcggtcgcgtttcgtttagtcgcgggggttattgatatagaggtttgttgcgtttggtgtgcgcggttcggtcgggtttttggaaacgtttatgagaaatgagtttatgttggatgcgcgcgttttttgggcgtaattgtttagcgtaaaacgggtttcgaaagtaggtgaggggaaatgtcgttaggtcggatattttgaagttttcgaggaaatgggggggttagaggagttcgtggtagttttggattttttggaattagggtgatttataaaagtgtagtttgagaagattttatatataagattagcgtttattgttttattatagaattagtttttttggtttgttttagaatagtgaggtatggttacgttaagataatagagaaagtagaatagatagttgttattttgattgtaatttagtggtgtttgtaatttttatttgtagagttatttttttttgttaagatgttgtttttagaaagtatatgttaaaggatttatatttgattagattatttggtttttgttttgaaatattgatgaaggatttgggatagaataaagtaagttttgatggaagataggaaaggtttagatagtgtttgtagatttaaatggttatagaggttagataagtaaagtaaatgagtgagattggttttgtgtaagataatggggaatgatagggaaaatggtaaattggaatatttatgttataattaaaaggaatagttgtttaattttagtagattgttgtttttaggaatgtgggtttagtgtttttagatgtttaatttt

SEQ ID NO: 358 - DNA, 2470 bp, Artificial Sequence
  Description of Artificial Sequence: Synthetic polynucleotide
ttttgtttttatgtttagtttattgaagtttgtttttaggttattggagttgagttttttgaatatttttggtttagagtgttgtagatttatgaattgttgtttgttgaaataaggtgtaaagtttattttgtttaaagtttttaataggagtgataatttaggtaaaatgtttatataatagtgggaaattaaaagtttgcgatatagaaaagtgatatatatttgtaaatttttttaataaaggtatcgtagtataagtatgattgtagagttagattgttaatgtttaaattttttttgggttttaatttttttatttgaaaatcgttaatagtggaatttagttgatagggttgttgtggagtaagcgtttttaatttggagtttatgaaattttagtatttgtgaattttgtattgaaaaaatcgtaattttatgtttattaattttataatagtttcgtttttttgaattataaaggtaggtaataaattatagtagtattattagtatttataattttgttttttatagaaattatttttatatttagtaagttgttgtagatattttgaataattatacgtatatattttttaagtattatatatataatatttttatattttgtatatatttttggagatagggttttgttttgttttttaggttggagtgttgtagtatgatcggaatttattgtaattttaaatttttgggttttagtgatttttttagttttagttttggaatagttaggattataagtattttttattatatttagttgttaatttttttttttttcgtaaagataaggttttattattttgtttaggttgttttttaatttttggatataagttttttgtataggttttttaaagtattgggtttataggtgtgagttatcgtgtttggttaatattatgtatttaattttatgcgtttagaaatatgtgttattttaagaaggcgtttataggttttattatattattaaaggtgtttatggtataagtgaagaaatttttagatattagagtaataaaaattatgatgtattagaacggattaggtttatattaaacgtttaatatatagtttgttgttatggttttttttttttttttttttttttttttgagatagagttttattttgttttttaggttggagtgtagtggagtgatttcggtttattgtaatttttgtttttcgggtttatgttatttttttgttttagttttttaagtagaggaattgtaaggcgttttattatgttcggttattttttgtatttttagtagaaatggggtttttttatgttacggtaggttggttttgaatttttgattttaggtgagttatttgttttagttttttaaagtgttgggattataggtatgagttattatgtttagtttgttatggtttttaaaatatttatagaatagaaattgaagtaagtttattcgtttttatattaaaagtagttagtacggtgttttgtatttatgtattttatggatgttgaatgagttattgaatgaagtggagtttaggttgtgttttaggttttttagtggggttggaaggaatagttgtgaagttgtggggcggtttttgtgtatcgggggattttggagttagatggttttttagggttttgaaggagaagagttgtgtttttaataatgattttaatgggaatagagattgttggggatcgtaggggttaggttgttattttttaaagttttttttttattatttaagaaggtatttaggtttttttgtgttaggttttaggtaaagtgttggattatttagtaattgggtttagtagtaggatggttttagattgaggttttagggttaaaggattatttttttttttagcgttggttcgggaaaggtaagtttcgggcgggagcgtacgtcgcgttttcgaagtttggttttttcgttacgtttattttttgtttttatttcgcgtttttttaggttttttttcggtgaatcggatgttttgttagtttttttttttgcgttttcggtcgcggttcgggtttttcgtaaagtcgttgttatttcggagggtttagttagcgggttttcggaggttggtcgggtaggcgtggtgcgcggtaggagttgggcgcgtacggttatcgcgcgtggaggagatattgttttgtcgcgatgggggttcggggcgtttttttacgtcgtaggtaagcggggcggcggttgcggtatttgtttatcgggagttttttttttttttttttgttgttgttgttttgtatttagttcgggggaggatagaagaaaaaggaggtagaatggatttttttggtttttttttgtgggcgggggcgggttagggtgggtcgcgttgttaggtagttttgtcgtgttgttaggtagtttggtcgtcggcgtgggcgatgtcggcgttggg

SEQ ID NO: 359 - DNA, 2470 bp, Artificial Sequence
  Description of Artificial Sequence: Synthetic polynucleotide
tttagcgtcggtatcgtttacgtcggcgattaggttgtttagtaatacggtagggttgtttggtaacgcggtttattttggttcgttttcgtttataggggaaggttaaggggatttattttatttttttttttttttgttttttttcgagttggatgtagagtagtagtagtaggagaaggaagggaaagttttcggtgggtaggtatcgtagtcgtcgtttcgtttgtttacggcgtgaaggagcgtttcgggtttttatcgcggtagggtagtgttttttttacgcgcggtagtcgtgcgcgtttagtttttatcgcgtattacgtttgttcggttagttttcgggagttcgttggttgggtttttcgggatggtagcggttttgcgagggattcgggtcgcggtcgaggacgtagaggaggagattgatagagtattcggtttatcgggagaagatttggaaaggcgcgggatgggggtaggaagtgggcgtggcgagggagttaggtttcgggggcgcggcgtgcgttttcgttcggagtttgtttttttcggattagcgttgaggagaggagtggttttttggttttgggattttaatttgaggttattttgttattgaatttaattattgggtagtttagtattttatttggggtttagtatagaaagatttgaatgtttttttggatgatgaaggggaagttttggggaatgataatttggtttttgcggtttttagtaatttttatttttattgagattattattaggaatatagttttttttttttagagttttgggaaattatttaattttagagtttttcgatgtatagaagtcgttttataattttataattgttttttttagttttattggaaggtttgaggtataatttagattttattttatttaatgatttatttagtatttatggagtgtataagtatagagtatcgtattagttatttttaatataaaaacgaatagatttattttaatttttattttatgaatattttaagaattatagtagattggatatggtggtttatgtttgtaattttagtattttgggaggttgaggtaggtggtttatttgaggttaggagtttaagattagtttgtcgtaatatggggaaattttatttttattaaaaatataaaaagtagtcgggtatggtggagcgttttgtagtttttttatttgggaggttgaggtaggagaatggtataaattcgggaggtagaggttgtagtgagtcgagattattttattgtattttagtttgggagatagaatgagattttgttttaaaaaaaaaaaaaaaaaaaaaaaaagaattatagtagtagattgtatgttgaacgtttgatatgggtttgattcgttttaatgtattatggtttttattattttagtatttagagatttttttatttgtgttatgaatatttttggtaatgtgataaaatttgtagacgtttttttaaaatagtatatatttttaaacgtatgaaattaaatatatagtattagttaggtacggtggtttatatttgtaaatttaatgttttgggagatttatgtaggaggtttgtgtttaagagttggagagtagtttgggtaagatagtgagattttgtttttacgaaaaaaaaaaaaattaatagttgggtatggtggggagtatttgtagttttagttattttaagattgaggttggaaggattattagagtttaggagtttgaggttatagtgagtttcgattatgttatagtattttagtttgggagatagagtaaaattttgtttttaaaaatatatatagaatataaaaatattatatatataatatttaaggaatatatacgtataattgtttaagatatttgtaataatttattgagtatgaaaataatttttgtaggaaataaagttgtaggtattgataatattattgtggtttgttgtttgtttttataatttaaagaaacgaaattgttgtgaggttaatagatataaagttacgatttttttaatataaagtttatagatgttgaaattttatggattttagattaagaacgtttgttttataataattttattaattaggttttattgttaacgatttttagataaagaaattaaggtttagaaaaaatttgaatattgatagtttggttttatagttatgtttatgttacgatgtttttgttaaaggagtttataaatatatattatttttttgtatcgtaagtttttgattttttattattatgtgaatattttgtttgaattattatttttgttaaaaattttagataaaataaattttatattttattttagtaaataataatttataaatttgtagtattttgaattagaagtgtttagaaagtttagttttagtggtttgagagtaagttttaatagattaaatataaaaataaag

SEQ ID NO: 360 - DNA, 2470 bp, Artificial Sequence
  Description of Artificial Sequence: Synthetic polynucleotide
agttgttttgtttagaagtcgattttttgatgtttttaacgtttggtttaattgatttgttttaatggagttttcgtcggtgaggagcgagatgttatcgattagaatgttgggatttgttgtttaattgttaggagtgagagatattgagatttagaaatttttggaggtgggaggggagagggatagtttcggacggaggcggagatgtaagataaagggatggattttatataggaaaaaaaaaaagatttcgttgaggtattgaggtgttgtacgattatattttttaaaggagaagttaaaaagtaaggaagtgggaggaggttggaggttaaagtatttaaaaggattattcgggtataatttgtttttttgttggtgtttgtaaaggatagatagtttcgtttttaaagtatatgaatgttttttttaagtgattgggaatggatattaattgtttgttaaatgttattaaatgtttttttaaatttaggggatatagaaagaggggtataaaaggagaatttaaatagaaaaagggaggattcggaggtttttgaaagcggggggagaagaaggaggagggataatagagaggaatagagaaggagagcggagagaagataaataaaaataaaaataggaattattgaataattatatattaaaaagaaagtttttttttatggggtatttaaaatattgagattgtaatagtgatttcggttatggaagaaagatgtttttttttatttttgttttcgaaagtttttggtttcgttattggcgattaaaattttattaggttaaagagtgtgtttaattgtttgaagaatgtagtagacggaaggcgggtttcgttatgtcgtttgtttttttcgttggagagaatgaaagaaacgcgtagagttagagatttttgtcgagttagattttttttcgtcgttttaggttatcggttattcggtaaagattcgagtaaggaacgtagggttattgtttgggttaataaatggagttcgttttttttttttcggacgtcgttgttcggtcgatgttttcggtaatttattcgcggcgtatgtagaggagttttttttttttttttagattatttgtttcgattaatttgattttttaaatatatttgatcgtattttttaggtggatatattaataggttacgggttggagaggagcgggtgatgaggagagggatttaaatttgcgaacgtttgggttgggtcggagttgcggggggtttgggaggagagaggggagaagagagaaggaaggagagcgtttgtcgggatggttgagttgtttcggcgagtagttttggggttgtacgtttttgtgggagatgttgttgttgtttttaggtcggtaagagcggttttaatattatcgttttttatttttttttttgtaaatttttagagaaacgtttttggttttttcgtcgcgatatttttagtttgtatttttttatagtttaggcggcgcgttttcgtacgttggagcgtcggtcgttagtaggacgttttttttcgcgtcgattcgtttttttttgttttgttgttgttgtttttttgatattttcgtttttattatttttagttcggagagacgttatttagtcgcggttcgtattcgcggttcggggttacgcgcggaagaggggcgttagttcggatttcgttttcggtagggggcgttttggagcggagagtgaggcgaatggtatatgagtgtgcgggtagtttattttgaagttcgagttttttatttgagttattttcgtttagttttattcgggttagcgtttggcgagcgagtttatttgtggttttcgcggtcgttttttttttgtatttttgtattttttcgtcgatttttttttttcgggatttgtattttgttttattaattagagttcgattgtttttttttacgtgatttcgggcgggttgaggatttgttgttttttaaacgttagagggatgcgggcggtagagttcgagaggcggttgtcgggttgcggggcgttttgattttttttttattttgttttttcgggttttattcgtttgtttttggattttcgtttttttttgtttttcggttttttagagttttttttttatggtagtagtttttcgcgttttcggcgtagttttttagcggacgattttttcgtttcggggttgagtttagtttttggatgttgttgaaattttcgagattatgcgcgggtttggttgttgttttttcgtcgggtgttattgttatcgtcgtcgtttttgttgtcgtcgttcgcgggatgtttagtagttcgttgttcggttttcgcgattttgtgtttttcggaagtcgtttgttgttgtagagttgtacgaattagttatggtgttgtgggagttttcgcggtagtgtagtagttggatattttgcgagggtttttgtt

SEQ ID NO: 361 - DNA, 2470 bp, Artificial Sequence
  Description of Artificial Sequence: Synthetic polynucleotide
agtaaaagttttcgtaaagtgtttagttgttgtattgtcgcggggatttttatagtattatgattagttcgtgtaattttgtagtagtaaacggttttcgaggaatataggatcgcgggggtcgggtagcgggttattgagtatttcgcggacggcggtagtagaggcggcggcggtggtagtggtattcggcggggaagtagtagttaaattcgcgtatgatttcgagagttttagtaatatttagggattgggtttagtttcggagcgagagggtcgttcgttgagaagttgcgtcggagacgcgggaagttgttgttataaggagggagttttgggaagtcggaggataggaggagacgggagtttaggggtagacgagtggagttcgaggaggtagggtggagggagagttaaggcgtttcgtagttcggtagtcgtttttcgagttttgtcgttcgtatttttttggcgtttgggaagtagtaggtttttagttcgttcggggttacgtgggaagaggtagtcgggttttgattggtggagtaggatgtaggtttcgggagggaggggtcgacgaggaggtgtaaggatgtaaggaggaggcggtcgcggaagttatagatgggttcgttcgttaggcgttggttcgagtggggttaggcggggatggtttaaatgagaagttcgggttttagggtgggttattcgtatatttatatattattcgttttatttttcgttttaggacgttttttatcgaaggcggggttcggattagcgtttttttttcgcgcgtgatttcgggtcgcgagtgcgggtcgcggttgggtggcgttttttcgagttggagatggtgggggcggaggtgttagaggagtagtagtagtagggtagagaggggcgagtcggcgcgggagagggcgttttgttggcgatcggcgttttagcgtgcgggagcgcgtcgtttaggttgtagggggatgtaggttgggaatgtcgcggcggagaggttagggacgtttttttagggatttataggaaagagggtgagaggcgatggtgttagaatcgtttttgtcgatttggaagtaatagtagtattttttataagagcgtgtaattttaaggttgttcgtcgaggtagtttagttatttcggtaggcgttttttttttttttttttttttttttttttttttttaggtttttcgtagtttcgatttagtttaagcgttcgtaggtttgaatttttttttttattattcgtttttttttagttcgtagtttattagtgtgtttatttgggaggtgcggttagatgtgtttggaaggttagattggtcgggataagtggtttgagagaaagagaaaggtttttttgtatacgtcgcgggtgggttgtcgggagtatcggtcgggtagcggcgttcgggaaggggagagcgggttttatttgttggtttaggtagtgattttgcgttttttattcgggtttttgtcggatggtcggtgatttggggcgacgagagaaggtttaattcggtaggagtttttggttttgcgcgttttttttattttttttagcgggaagggtaaacggtatagcgggattcgtttttcgtttgttgtattttttaggtagttagatatattttttagtttaatggaattttagtcgttagtaacgggattaagagttttcggggataagggtggagaggaatattttttttttatgatcggggttattattgtagttttagtgttttggatgttttatagggaagagttttttttttggtgtgtgattatttagtgatttttgtttttgtttttgtttatttttttttcgttttttttttttatttttttttgttattttttttttttttttttttttcgtttttaaaagttttcggattttttttttttttatttaaattttttttttgtgtttttttttttgtgttttttgaatttaggagagtatttgataatatttaataggtaattagtgtttatttttaattatttaaaagaggtatttatatattttgaaaacgggattatttattttttgtagatattagtagaaaaataaattgtattcgagtaatttttttaagtattttaatttttaatttttttttatttttttgttttttaattttttttttgagagatgtgatcgtgtagtattttagtgttttaacgaaattttttttttttttttgtgtgaaatttatttttttattttatattttcgttttcgttcgagattgtttttttttttttttatttttaaagatttttgaattttagtgttttttatttttggtaattaagtagtagattttagtattttagtcggtggtatttcgttttttatcgacgaagattttattaaaatagattaattagattagacgttggaggtattagaaaatcggtttttagatagagtagtt

SEQ ID NO: 362 - DNA, 2470 bp, Artificial Sequence
  Description of Artificial Sequence: Synthetic polynucleotide
atatttaaattgtatatttggtttgtaatatattatatatttaaaagaattattatttttttgaatattattaatattaataatagtattatagtgattaagagtggatttaaataaaggttggtttgaaatttaggtttgttatttattagtaagtttttaaaaattttgagtttttagtttttttatatgtgaaatggagaaaataaatttgtaaaattaattaaatttgtttatttatatttttttttttagtgtatattaattggtatttttcgttaggttagaatgtgtttttaattatgttttaaattcgttttgtgttaattttattgttagaattttttttattttgagaattagaaaaggaaatattatgtttggtaatgtttatattttttaaaataaatttgtaggaaagaatatttagtaagtgatgagagtagtaacgattgtttttattattttaaatttataatattattttttttagagttttttaagtattgtagataattttttatttattaaaaaataaattgtaattataagtatttagggttgatattgtttttgaattagatagtgtttatattagttgtataagattaatttaaagtagaggatgaaattttttttttgaattttttttagaacgtaatttagtgaatatattaaaattaaattttttttgaatgggagtaatttttacggattaatttgtaattttttagattatatttaaggtaatgtagaggttgttgtattataggttttgtgattagagattattggatttgtttttggaaaagttatttatgattttttgggttttggtttttttattttttatatcggtttaataatgattatcgtagagttgttatggaagttaaatgaatttatgtattataagtgattaatataatgattgatatttagtgatttattaataaattaaaatatttattattaatatgatagagaaggtgtcgttaaaatagataataggtttttggaagaggtgattaaatggatgtaaaatttatggattgtttatttcgtttatttttgttgtgttttttggttgtggtatatatacgtgtgggtataaaatcgtaaattttatgtagtcgcgtagtgtatgcgtagaaggtttagatacgaaatgttattttagtaatgtgtttagagaagttttgacgtcgttttggaagtaagtcgttgttgtttgatttttgggcgtttgggacggatgtttatatttgtatttagtagtattggaaggggtttaggtttttcgtagtatagtttatttttagatcgtttagttttttataatatatatttttacggaaaagggtattttttttcgttagaaaaagcgttttagtttggtttgggttggtttttattttacgttgttgtaagtaggcgaagttttttttgtttttttttttggggtaagtggaaaggagttcggtagggggttcgtagtggtttgtataggggaattgggtagcgagagagttttaggtaatttcgggggttgttttatagaagtaggtggggatcgatagtggtttttcggtttagggaggagagcgcggtcgcgggtttttttttttagtttggaggttgtagtcgttcgagtcggttcgggtgggggcggggtgggggcggcgcggagggtacggagattacggcggcgttattcgggatatttagggtttcgaggttttgggcggtttttacgcgagatcgtaaattatgataataggtagttattcgaggttaaataaaaacggagtgggtttttcgcgcgtcgtcgtttttcgcgtttttggcggtttttttcgaggttttcggcggttttacgagttcgtagtagtcggtggcgacgtcgttttcgttttatttttttgcgtaagtgcgaggttgtcggtagcgcggcgtacgtttcggtcgttttcggttttcgcgtaaaatttttattttgtttacgtgaagttgtcgttgttttagagagggggaaagagttgcgggaaaagtcggggagtgacgattgcggcggttgggcgcgtttttttattttttttttttttttttttttttttgtcgtagttcggagttttggttttttttttttttttttttttttcggagtcggttttttttttcgtttcgtttttttttcgtttgtgtacgttatttgttgtggggtggtcgaaggggatgttttgtttttattagaggtatagcgcgaaggggaaatttcgatattggaaggaacgagaataaatatttaattacggacgtattgaatcgcggttgggatagatatttcgggaattcgaggcggatcgggcgacgaggtgagtgatttttttttttaattttcgttttagggttttcgggggagtttgagttgagagaatttttaaatttttcgggaaagtgcgcgaggttt

SEQ ID NO: 363 - DNA, 2470 bp, Artificial Sequence
  Description of Artificial Sequence: Synthetic polynucleotide
gagtttcgcgtattttttcggaaagtttgggggtttttttaatttaggttttttcgggagttttggggcgggggttggaagaaggggttatttatttcgtcgttcggttcgtttcgggttttcgaagtgtttgttttagtcgcggtttagtgcgttcgtaattaagtatttattttcgttttttttagtgtcgaagtttttttttcgcgttgtgtttttggtgaaaataggatatttttttcggttattttataataaatagcgtatataagcgggggagaagcggggcggagggagaagtcggtttcgagggggaggaggaaaggagaggagttaaaatttcggattgcgataggggggaaaggagaagaaaagaaaatgagagagcgcgtttagtcgtcgtagtcgttatttttcggtttttttcgtagttttttttttttttttaaggtagcgataattttacgtggataggatggaagttttgcgcggaagtcgggaacggtcggagcgtgcgtcgcgttgtcggtagtttcgtatttgcgtagggaggtggggcgggggcgacgtcgttatcggttattgcgggttcgtgaggtcgtcgggggtttcgggggaggtcgttagggacgcggggggcggcggcgcgcgggggatttatttcgtttttatttgatttcgggtgattgtttattgttatggtttgcgatttcgcgtggggatcgtttagggtttcggggttttggatgtttcgggtggcgtcgtcgtaattttcgtgtttttcgcgtcgtttttatttcgtttttattcgggtcgattcgagcggttgtagtttttaggttgaggggagggattcgcgatcgcgtttttttttttgggtcggagagttattgtcgatttttatttgtttttgtggggtagttttcggaattgtttggaattttttcgttatttagtttttttgtgtaggttattgcgggttttttgtcggatttttttttatttattttaagggaggagatagaagggatttcgtttatttgtaataacgtgaaataaaaattaatttagattagattggggcgttttttttgacgggaggaaatattttttttcgtggagatatatgttatgaaggattaagcggtttggggataggttgtgttgcgaagggtttgggttttttttagtgttgttgggtgtaggtataggtattcgttttagacgtttaaaggttaggtagtaacgatttatttttaaggcggcgttagagtttttttaggtatattgttgaaatgatatttcgtgtttaagttttttgcgtatgtattacgcgattatataggatttacgattttatatttatacgtgtgtatgttataattaggggatatagtaaaggtagacggaataaataatttataaattttgtatttatttaattattttttttaaaaatttattgtttattttagcggtattttttttgttatattgataataaatgttttaatttattgataaattattgagtgttaattattgtattggttatttatggtatatgagtttatttaatttttatgataattttacggtggttattattaagtcggtataaaagatgaggaaattaaagtttaaagaattatgagtgatttttttaaagataaatttagtggtttttaattataaagtttatgatataataatttttatattattttaggtgtggtttaagagattatagattaattcgtagaaattatttttatttaaagaaagtttagttttaatatatttattaagttacgttttgaaaaaggtttagaaaaaagattttattttttattttaggttggttttatgtaattgatatgagtattgtttaatttaaaagtagtattaattttgaatatttatggttataatttattttttaatgagtggggaattatttataatgtttaagaggttttagaaaaggtggtgttgtaaatttaaaatgataaaggtagtcgttgttgtttttattatttattgggtgtttttttttgtagatttattttggagggtgtaggtattgttaggtataatgtttttttttttggtttttaaggtagaaagggttttggtagtggggttggtataaagcggatttggagtatggttgagagtatattttggtttaacgaggaatgttagttaatatatattggagagaaaaatatgaatggatagatttaattaattttgtagatttattttttttattttatatgtgagaaaattaagggtttagaatttttagaagtttgttaataaatggtagatttgagttttaagttagtttttatttaagtttatttttagttattgtgatgttattattagtattaatggtatttagaaaaatagtaatttttttaaatatgtaatatattataagttaaatatgtaatttaaatgt

SEQ ID NO: 364 - DNA, 947 bp, Artificial Sequence
  Description of Artificial Sequence: Synthetic polynucleotide
ttgttgtttttaggggttttggttttgatcgatatttgggcgggtgagtgcggggtttagagagaaacggtttttgtggggaggagtgaggggttcgttcggtgggggcgtaggatttagggagtcgcgttcggaggagggtttggcgggttttagttttttttcgtttttaggtttttattttttgaggtattttagtatcgttgtgtcgcggttcggtcgcggggagtttcgttatatcgtcgtggagtacgtagacgatacgtaatttttgcggttcgatagcgacgtcgcgatttcgaggatggagtcgcgggagtcgtgggtggagtaagaggggtcgtagtattgggagtggattatagggtacgttaaggttaacgtatagattgatcgagtggttttgaggaatttgtttcgtcgttataattagagcgaggttggtgagtgaattcggtcgggggcgtaggttacgattattttttattcgttacggatcgttcgggttttttagagttttcggattcgaaatttatttcgaggtagcgggattcgtttagattttttattcgggagagttttaggcgtttttatttaggtttatttttagtttaggttaaaattttcgcgggttgggcggggagggggcggggttagttgggcggggttgattgcggggatcggttagggttttatattttttagggaatgaatggttgcgatatggggttcgacggacgtttttttcgcgggtattattagtacgcgtacgacggtaaggattatatttttttgaacgaggatttgcgtttttggatcgcggcggatatcgtggtttagattatttagcgtttttatgaggtagaggaatatgtagaggagtttaggatttatttggagggcgagtgtttggagttgtttcgtagatatttggagaatgggaagga

SEQ ID NO: 365 - DNA, 947 bp, Artificial Sequence
  Description of Artificial Sequence: Synthetic polynucleotide
ttttttttattttttaagtatttgcggagtaattttaggtattcgttttttaggtaggttttgaatttttttgtatatttttttgttttatagaagcgttgggtgatttgagttacggtgttcgtcgcggtttaggagcgtaggttttcgtttagggagatgtaatttttgtcgtcgtacgcgtgttggtgatattcgcggaggaggcgttcgtcgggttttatgtcgtagttatttattttttggagggtgtgagattttagtcggttttcgtagttagtttcgtttagttagtttcgtttttttttcgtttaattcgcggggattttggtttaaattgaaaatgaatttgggtaaaggcgtttgggattttttcgggtggagggtttgggcgggtttcgttgtttcggggtagatttcggattcggagattttgagggattcgggcggttcgtggcggatggggggtggtcgtgatttgcgttttcggtcgggtttatttattagtttcgttttggttgtagcggcggagtaggttttttagggttattcggttagtttgtgcgttggttttggcgtattttgtggtttatttttaatattgcggttttttttgttttatttacggttttcgcggttttattttcggaatcgcggcgtcgttgtcgaatcgtaggaattgcgtgtcgtttacgtattttacggcgatgtagcggggtttttcgcggtcgggtcgcgatatagcggtgttgaaatattttaaggagtgggagtttgggggcgaggaggggttgagattcgttagattttttttcgggcgcggttttttgagttttgcgtttttatcgggcgggttttttatttttttttatagaggtcgtttttttttggatttcgtatttattcgtttaagtatcggttagggttagggtttttgagagtagtag

SEQ ID NO: 366 - DNA, 3120 bp, Artificial Sequence
  Description of Artificial Sequence: Synthetic polynucleotide
aattttaagtttaggtcgggtatagtggtttacgtatgtaattttagtatttggagggatcgaggtgggcggattataaggttaggagattgagattattttggttagtatggtgaaatttcgtttttattaaaaatataaaatttagttgggtatgatggtacgtgtttgtagttttagttatttgggaggttgaggtaggagaatcgtttgaattcgggaggtggaggttgtagtgagcggagattgtattattgtattcgtttggtgatagagtaagattttattttaaaaaataaataaagaaaatttgaagtatagtatttttttaaattttaaatagataatagaaattggtttttttttatttaaattagaatttaagtttaattttatatatttttgatagtttggattttgttttttaattttataaaattgggaatttaagtattatttggttcgatttaaatgtaatgtagaatttgtattaaaatattatattaaagttttagatttgtagtagttaatagtatttttatgtatgtgttagggattgttttaaatattttatatatattaatttttttattttgtatttttgttttcgttttatatagtaggaaattgaaatattgagaggttaagtaattaaagttatagagttagagtgataggagtaaagttttaatttaggtaatttagatttttagagttttgatttttattattaagttgttagtatagtttttttggtaattatttttaatttaaatataattcgagtgatttatttaataagttattattttgataatttagtgatttgtaatgtaaaattatttattgtaatttatttaatattattgtttttttgtgttgtaaaaattatagtaatcgagatgtaatttattatttttttttttattttcggtattttgtgttaatttttttgttttgcggatttttttcgattttttattatgcgtgttaattgttattaatttttttgtttgttggggattggggtcgcgagggtatattttcgaggggtacggggttagggttaggtaggttgtgcggttgggcggggttttgtgttttattgcggagtgcgggtcgggaagcggagagagaagtagttgtgtaattcgttggatgcggattagggcgttttttattttcgtcgggagttcgtcgattggttgggtgtgggcgtacgtgatcgatatgtggttgtattggtgtagttcgttagggtgttattggagatagaatggaggtgttgtcggattcggaaatggggtaggtgttggagttattatggttaggtttgttgcggggggaggggggaaggtggttttttttcgtattgttttaaatcgatggtttttttttggtatagggtttattgtagtatgttaaacgaggaggtaggggcgtcgttttttcgttttttattgtagtattggagatggattttttgtatttcggatttagggtttttgatagaagaggaagaagggggaggggtagaagtgttaaggggagtttgttgagaaaagttgtttttgaagttagaaggggtttttgtttttataatgttatttgatagagtggaataatagtatttaaggaaacgggtagaggataataaagaatggagtatatttatggcgaggagtaaaagttttattttattgaaaggtttttttttttttttggcgataaggatatatgtattggtggttaaaagagagaggagataaaatcgttgtagatggttgatgtgaatttagtggaaagagttattggggatgagagaaagaggaggaggtaggtattgtagagcgtgagtggtggtgttggttggtgaaatattggttattagtagtgtgtttgtttttgtaaaatatttaagtaaattttttgtgaatagggtggtaaatagatattagtgtttttgttagttataaaatgtagtggtagtggttttttgcggacgattgtagtagtgttttttttttttttgttaggtcgaaaagataattgtagaggaataagaaattttgtagtaaatgttggggtagaagtttatttataagaagttatagtttataaatgtagtttgaatagtagaaaaaaaattattgttttttaaagtaggaataatgttaggttatgaatgttttgttattggaatgtattggatattttgattttatattacgaaagtgatgtttaaattttttgatttaatataaattttatacgaaattttaataaattatgtatgaaatagtggatttttttttttgttagtgaagtttttatgttattaattaggttatttaagagtaaattattttataacgtaaattattttgttaaaaattatggtgaataaatttttgtaggtttaatatttaagatttatagttaagtaattttatatttttttttggttgtttttagataatattgaataaatatttaagatattaatttagtgtgtaaatattttaaattaaagtaatatggttttttttttagatgtatttttgtttagtgagtatttatgagatatatttttgatataaagtgttttttattgagttttttttttttttatttaaatgtaaaagtttatttttatgtatatttatagtagttagtttgttatatttttttattttttgaataaggatggtagtggttttgtaaagttttttagggttagtgatagtgttttttaaataatgtttatgtaatagaaagttttaagatgatttattatattgttttagtaatatttttaagataatgcggaattgggttggtttagataaataagattatataagttttttattgataaatttaaatagttttttaaaaaattatttttgttttaagaattatttgattatggatattagggttaatagtatttaggagtcgggcgtggtggtttatgtttgtaatataagttaaataggaggttgagggaagttgaggtaggaggattatttgagttttggcgtttaagattagtttgggtaattaagtaagattttattttaaaaaaaagtatttagagttttttttttaaaatttgat

SEQ ID NO: 367 - DNA, 3120 bp, Artificial Sequence
  Description of Artificial Sequence: Synthetic polynucleotide
attagattttaaaaaagagattttaagtatttttttttgagatagggttttgtttggttgtttaggttggttttgaacgttaaggtttaagtgatttttttgttttagttttttttagttttttgtttagtttgtattataggtatgggttattacgttcggtttttaagtattattaattttgatatttatgattaagtaatttttaaagtagaaataattttttaaagaattatttaaatttattagtgaaaaatttatgtagttttatttatttaagttagtttaatttcgtattattttgaaaatattattgaaataatataataggttattttaagattttttattatataaatattatttaagagatattgttattgattttggagggttttataaagttattgttatttttgtttagggagtggggaggtgtggtaggttggttattataagtatgtataaagataggtttttatatttaggtaaaggaaaaaaaagtttaatgaaaaatattttatattaagagtatattttatgagtatttattaaatagaaatatatttagaagaaaagttatgttgttttaatttaaaatatttgtatattgaattaatattttaaatatttatttagtgttatttaaaagtaattaaagagaaatataaaattatttaattataggttttaaatattaggtttataaaaatttgtttattataatttttgataaagtaatttacgttgtaaagtggtttgtttttgaatgatttaattaatggtataaaagttttattaataaaagaaaagatttattgttttatatataatttattaagatttcgtataggatttatgttaaattaaagaatttgagtattattttcgtgatgtagaattaaagtgtttaatatattttaatgataaaatatttatagtttgatattatttttattttaaaaaatagtaattttttttttgttgtttaggttgtatttataaattatggttttttgtaaatgggtttttattttagtatttgttgtaaggttttttatttttttgtagttgttttttcggtttaatagagggagaaaaagtattgttgtagtcgttcgtaaaaagttattattattgtattttgtaattaataaagatattggtatttgtttgttattttgtttatagggagtttatttagatgttttataaaagtaggtatattattggtgattagtattttattaattaatattattatttacgttttgtagtatttgttttttttttttttttttatttttagtagttttttttattagatttatattagttatttgtagcggttttgtttttttttttttttggttattaatgtatgtgtttttgtcgttagggaggaaaagaagttttttaatggggtagagtttttgtttttcgttatgaatatgttttattttttgttgttttttattcgtttttttagatattgttattttattttgttaaatggtattataaaaataaaaattttttttggttttaaaaatagttttttttagtagattttttttaatatttttatttttttttttttttttttttttgttaaaaattttggattcgaagtataggaaatttatttttagtgttgtagtggggggcggggggacgacgtttttgttttttcgtttggtatgttgtagtggattttgtgttaaggaaaggttatcggtttaagatagtgcgagggaaaattattttttttttttttttcgtagtaagtttggttatggtggttttagtatttattttattttcgagttcggtagtatttttattttgtttttagtgatattttggcgggttgtattaatatagttatatgtcggttacgtgcgtttatatttagttaatcggcgggttttcgacgggaatggggagcgttttggttcgtatttagcggattatatagttgttttttttttcgtttttcgattcgtatttcgtagtggggtatagggtttcgtttaatcgtatagtttgtttagttttagtttcgtatttttcgggggtatgttttcgcggttttagtttttagtaagtaaggaagttgatggtagttgatacgtatagtaaagagtcgggggaggttcgtagggtagaaggattagtataagatgtcggaggtgggagggagagtaataaattatatttcgattgttatgatttttgtagtatagagaaataataatattaaatgaattataatgaataattttatattataagttattgagttgttagagtgatgatttgttagatagattattcgaattatatttgaattaaaaatagttattagaaaagttatgttagtagtttagtagtggagattagaattttggaagtttgggttgtttgagttgaagttttatttttgttattttagttttgtaattttagttatttaattttttagtgttttaattttttgttgtataaaacgggaatagaagtatagaatagaggagttaatatatatgaagtatttagagtagtttttgatatatatatagaagtgttgttagttattataaatttgaggttttaatgtagtattttaatgtaaattttatattgtatttaaatcgaattaggtgatgtttaaatttttaattttatgaggttgaaggataaaatttaaattgttaagaatatataaagttaaatttaaattttggtttaaatggggggaaattagtttttattatttatttaaaatttaaaaggatattatattttaagttttttttgtttgttttttgagatagagttttgttttgttattaggcgagtgtagtggtgtaattttcgtttattgtaatttttatttttcgggtttaagcgatttttttgttttagttttttaagtagttgggattataggtacgtgttattatgtttagttaagttttgtatttttagtagagacggggttttattatgttggttaggatggttttaattttttgattttgtgattcgtttatttcggtttttttaagtattgggattatatgcgtgagttattgtgttcggtttaaatttaaagtt

SEQ ID NO: 368 - DNA, 2501 bp, Artificial Sequence
  Description of Artificial Sequence: Synthetic polynucleotide
gtgttttagtttttgaatttatgttgttcgttattatattgtattgtttgtggatgatttatttgtttttgtagttttatttgaagaatttttttttttttttttttgaggtttgttttaaatattattttttttgtgaagattgtttggtgttttttaggagagagtgtgatttttttttttaggaatggtagtattttaaatatatatattttgtagtatattttattttgtatggtaatggtttgtttgtgagttttatttcgtattagagggtgagggttttgaagatagcgttaggttttatttatttcgatattttataatatttattatatgtttgatgaatgaatgtatagggggatggttgggtgtattttttttaattttttaattttttgaaataaataataaaattttatttttttttagaagttttggtatggttttttttattttgttatagttattgataattatttttattttttgtgtaatttattaggtaagaagtttatgtagatttatttttagtagtttatatgataaataaatattgcgtttgatttttaaatattaaattatagtatattatagatagatatagagttattatttaaagtatgatattttaattttaaaaggttttttttgaagaatattataaattttttttttttttaagatttgttgggtaggaaagatgggagaaaatgaattaatgtttatatagaaaggaggataatgggggtaaaaataatagatgaacgtatgggtggatgagagaatggataaaatgataggtggatatgttgattttggatagatgggaaatgagtggatatattaataaatagatatgtgggtggatgggtggagaagaggatggtggatggttgtggttttatgaagagatgtgaaaaaggaagtgtggaatgatggatgagaagttgtatgggaagatgaatagaagaataggtggttgaataaattaaaaggtgtgtggttggatgaatgaatgagtgggatgatagatggatttaagtggttagtggatggataggaggatggatggatgtgagagttttagaaggatataaggaaagatgggtggatagatggatgggcggatggaaggatatttaggaggatgaatgagtatgtgtgtggagagaggtgtttatttatattggtttgaatatatgggttagttgagttaaatgttagttttatgataggttattagtagttttttttgagttgttttgttaagaagttaaaatttatttaagttatgtggatttgttattgaggggaaaaagaatgagttttttttttttttatttggaagatttattaattttttattttttattttttattgtgggtacggaggtattgcgttatttagggtaagatttcgttttttttttagttttttttttaggatatttaatattttgtgaaatttagagattttgttttagtcggatttagagaaatttagcgggaaaggagaggttaaaggttgaatttaatggtgtaaggttttacggttcggttattttttgttttgacgtcgcggggttagcgggagaagaaagttagtgcgtttttgggcgtaggggttagtggggttcggaggtataggtatttcgcgatattttaggtttttcgatttacgtttttggtagtttcgattatttatagttttagtagagtacggggcgggggtagaggggttcgttcgggagggttgttattttttaaaatttttgcgggttgtttagttatagttttttttgtttgggtgtgtttttcgttcgtttttttttttcgttttaggttattgtttttaatttcgaataaaaattgtagttaattttcgaggtagttttattgtttagcggattttagtttttgttaggttcggttcgttattttcgtttcgtttttcgtcggtttttgtttcgcgtttagggattttttagtttttttcgttcgcgtttttcgttcgtttcggatattatggataagttttggtggtacgtagtttggggattttgtttcgtgtcgttgagtttggcgtagatcggtgagtgttcgtcgtagtttgggtagtaagatgggtgcggggtgtttagcgcggattcggcggtagttttttcggttgagtcggttttgggggattggagttaagtgagttgtttgcgaagtgtattgggtttcggaaagtagggttgggatttgcgttaaatcgttggagaatgtgtttgtggaagtattatttggttgaaagaaaaagagaaagagaagaaagtttgttgggtaggttgtcggcgcgtagttttgggcgaggtcgttagagttgtagtatatggtagaaagtaatcgttttttcggatgcgtatagtcgttgtttggattaataggtttttgtgtttaagggttcgttaagttttatcgggttgtgtttaggtagggtagagttgggcggggta

SEQ ID NO: 369 - DNA, 2501 bp, Artificial Sequence
  Description of Artificial Sequence: Synthetic polynucleotide
tgtttcgtttagttttgttttgtttagatatagttcggtggggtttggcgagtttttgggtataggagtttgttagtttagataacgattgtgcgtattcgggagaacggttattttttgttatgtgttgtagttttagcgatttcgtttaaaattgcgcgtcggtagtttgtttaataaattttttttttttttttttttttttttaattaaatggtgtttttatagatatattttttaacggtttagcgtaaattttagttttgtttttcggagtttaatgtatttcgtagatagtttatttgattttagttttttagggtcgatttagtcggaggggttgtcgtcgggttcgcgttgagtatttcgtatttattttgttgtttaggttgcggcgggtatttatcgatttgcgttaggtttagcggtacgaggtagagtttttaggttgcgtgttattaaaatttgtttatggtgttcggagcgaacggagggcgcgggcgaaaggagttggaggatttttgggcgcggggtaggggtcggcggaggacgggacgaggatggcggatcgaatttggtagaggttggggttcgttgggtaatgaggttgtttcggaagttggttgtagtttttattcgaggttgaaaatagtgatttaagacggagggagggagcgagcgaaggatatatttaagtaaggggggttgtgattaagtagttcgtagaggttttaagaagtagtagttttttcgggcgggtttttttgttttcgtttcgtgttttgttgaggttgtaaataatcggggttgttagggacgtgggtcggggaatttggagtgtcgcggggtgtttgtgttttcgagttttattggtttttgcgtttagagacgtattggtttttttttttcgttggtttcgcggcgttaggatagaggatgatcgaatcgtaaaattttgtattattgggtttagtttttggttttttttttttcgttaaatttttttgaattcggttggagtaagatttttgggttttataggatgttggatattttgggagaggagttggagagagggcgaggttttgttttgggtggcgtagtgttttcgtgtttatagtggggagtgaggggtggggagttggtgaattttttaagtggaaagagggagagtttattttttttttttttaataataagtttatatggtttgaatgaattttagttttttggtagaatagtttagggaaagttattgatggtttgttatagggttggtatttggtttagttaatttatgtgtttaagttagtgtgaatgggtatttttttttatatatatgtttatttatttttttaaatatttttttattcgtttatttatttatttatttatttttttttatgtttttttggggtttttatatttatttatttttttgtttatttattaattatttaggtttatttattattttatttatttatttatttaattatatattttttaatttatttaattatttatttttttatttatttttttatataattttttatttattattttatatttttttttttatatttttttataaaattataattatttattatttttttttttatttatttatttatatatttgtttattgatatatttatttattttttatttgtttaagattaatatatttatttattattttatttatttttttatttatttatacgtttatttattatttttgtttttattatttttttttttgtgtaaatattaatttatttttttttattttttttatttagtagattttaaagagaggaagagtttgtaatattttttaggggaagttttttgagattgaaatattatattttgaatgataattttatatttatttataatatattatggtttaatgtttggaaattaaacgtagtatttatttgttatgtgaattattaaaagtaaatttgtatggattttttgtttggtgagttatatagaaaatgaaagtgattattagtggttgtggtaagatgaaaggaattatgttaggatttttgagggaaggtaagattttgttatttattttaagaaattgaaaagttgagagaaatgtatttagttatttttttatgtatttatttattagatatgtaatgagtgttgtggggtatcgaggtaaataagatttggcgttatttttagagtttttattttttggtacggaataaaatttataagtaggttattattatgtaaggtgaaatatgttgtaaaatgtgtgtgtttggggtgttattatttttagagaagggagttatatttttttttggagaatattaggtagtttttataggggaagtgatatttgaggtaggttttaaaggaaaaggaggaggaattttttagatgaaattatagggataagtaagttatttataggtagtatagtgtagtgacgaatagtatggatttaggagttagaatat

SEQ ID NO: 370 - DNA, 2501 bp, Artificial Sequence
  Description of Artificial Sequence: Synthetic polynucleotide
agatttatttaaatttaagaatgagaatataaatttatattttgaagtgttttatagaaaggtttattttaatgtttggagtatatattttaatgaatatttattttattttatttttttttatttttgaattaagtaattttgaatttaaagttgttatgattagtattgaaaagattattggattattaattgtgtgattttgggatagtaattttttgtattttagtttgtttatatgttatatatgaaggttgaagtttgattttgttttgtgattattattttaaatatttgatgaaattaaattttagtgtttggaatggtagtataataaatttattaagaataaataatttattgtaaaaatatattgatttttaaatgatgtaattgatagttatattattgtagagggttgataaataataaaagaaatgaaagatgtatatggtgagaattgaaattattttgataagttttttatttgtttattatttaaaattaatgattatgttgaatgtttataaattataaaatataaaagaaattttataaatgcgtatgtataggagtttaagttattaaaagttttaaagtataagtttaaattaaattaattaaagaagttgagaggaaaaattggtttttatttttaattattattgttttgaggttttatgtttaatataattttttaagtagaggttttagagagaagagttgtgaggatatttttatatttgtgtagaaggaaaagtttgttatttattttagtatttttagtgttatattgatgtgtattttggatttattttgtttttattgtataaatttatatttgattttaaagaaaaggaaaatttaaagttttttttttttaaggggatagaaattttttgtgttaattgtttgatttttttttttgtaaggttttattggaaattttttgtaatataatgtaggggatttttttatgtgttgatgttgtttatatagtggggtgggtttgattgaagaaaaaaaatcgtatatacgtatgaaagattatggttttattttcggaaagtatgaaaggtgattgatatttttaagaagtttttgttatttaggaaaattattaaatattttatttagagatatttggaaagattgaaggaaaggaagaacgaagaaagtagaatttagatttatgtggggagagatttgtggtagaggaaaagtattttttttgaattcgataagggatttgtttgggggaattttttgtttagttttttattattagggttttttgaagtcgggttttttattgggtagttttttgggagtgtagtggggaatttttatattttttttttaggttttcgaaggatttcgtttttttagtgttttttttaggttggtaggagttttgagtttgatatttttttttgatgggataggtaagttttgtgggcgcgtaaatacgttgtaattaagttttttgttgattttatagttttgtgtgttttcgagaagaagtgatcgtatttaattgtttattgttggtttgttttttaagagtttgggggttttttttttttaatttagaattagttgtacggggggcggggaaatgggggtggggaaggagtgggagggtagtggttttcgcgagtagagcgatgttattgagtgagtttttgaatggggagcgttgttgtttttaagtcgattggtattttttgttaggaagaaacgttaagaggtgggagtgtttggggagggaggtaggcggtttttatcgtaggcgcggggagttgttttttcgttttttcgtttgttttttaagtttggatttttaggagtggttgaagttgcggagcgtttttggagtttgtgaatgaattttttttttttttttttttttttttttcgttgagtttttttttcggttttgacggtatagtgatataatgatgatgggtgttataattcgtatttgaatttgtaggcgagttgtttcgagtttttttggggaagaattttaggcgtgcggacgtaatagtcgagaatattaggtgttgtggataggagttgggattaagattttcggttagtttcgtattttttcgtattttttagtatcgtttcgtatttttcgtattttttttcgggttattacgttttttatgtgattcgtttgggtaacgtcgaatttagtcgcgtagcgttgtagtgaattttttttttaaattgtaataagtcgttttttaaggtaattacgttttttttgttttttttttaaaaaataaaaataaaaaatttatagaaaaaaattcgcgagtttagaaaaaagaagtaattggtagaaggttttaattaaggtaaagagttgtaaggcgaagttaagaaaatgtaggtatttaaaaaatgtaggtaatttttataagggtttttggggagaggtatatagagggattttggtgttgaaaaagatttagataaaagaaatttag

SEQ ID NO: 371 - DNA, 2501 bp, Artificial Sequence
  Description of Artificial Sequence: Synthetic polynucleotide
ttgggttttttttgtttgaattttttttaatattaaggtttttttgtatgtttttttttaaaagtttttatgaaagttatttgtattttttaagtgtttatatttttttaatttcgttttatagttttttgttttaattaaagttttttattaattgttttttttttttaagttcgcgggtttttttttataagttttttgtttttgttttttaaggggggaataaaagaaacgtgattattttggaaggcggtttattgtagtttggggggaaaatttattgtagcgttgcgcgattgggttcggcgttgtttaggcgggttatataggaagcgtggtggttcggggaaggatgcggagggtgcgggacggtgttggaagatgcgggaggatgcggggttggtcgaagattttggttttagtttttgtttataatatttaatgttttcggttgttgcgttcgtacgtttggagtttttttttagaaaggttcggggtagttcgtttgtaagtttaaatgcgggttgtgatatttattattattatattattgtatcgttagagtcgaggaggagatttagcgagaagaaggaggagggagaggaggagggtttatttataggttttaaaagcgtttcgtagttttagttatttttaagagtttaggtttggaaagtaggcggaggggcggaaaggtagtttttcgcgtttgcggtagggatcgtttgtttttttttttaggtatttttattttttggcgtttttttttgataagaagtattaatcggtttggggatagtagcgttttttatttagggatttatttagtaatatcgttttgttcgcggaaattattgtttttttattttttttttatttttattttttcgtttttcgtgtagttagttttgggttaggggaaaggagtttttaggtttttagggggtaggttagtaatagataattgagtacgattattttttttcgggagtatataaaattgtaaaattagtaaagaatttggttatagcgtgtttacgcgtttatagagtttgtttgttttattaaagggaagtgttaggtttaaggtttttgttaatttgaaagagatattgagaaaacgagatttttcggggatttagagggaaagtgtaagaattttttattgtatttttagggaattgtttaatggggagttcggttttaaaagattttggtaataaaaggttggataggaaatttttttaggtaaattttttgtcggatttaaagagaatattttttttttgttataaatttttttttatataagtttagattttgtttttttcgtttttttttttttttagtttttttaagtatttttgagtagaatatttgataatttttttgagtaatagggattttttggaagtattaattattttttatgtttttcggaaataagattataattttttatgcgtatatgcgattttttttttttagttaggtttattttattgtgtaaatagtattaatatatggaagagttttttgtattgtgttataaaagatttttaataggattttatagagaaaagggttaaatagttgatataaaggatttttgtttttttagaaaagagggattttggattttttttttttttgaagttaagtatgagtttatataataggaataaaataaatttaaggtgtatattagtataatattagggatattagaatggatggtaaatttttttttttatataaatatgaaagtatttttataatttttttttttgaagtttttatttagaaaattatattaaatataggattttaaaatagtagtgattaaagatgaaagttaatttttttttttaatttttttgattagtttggtttaaatttatgttttaaaatttttagtaatttagatttttgtatatgcgtatttataagattttttttatattttgtaatttgtaggtatttagtatggttattgattttaagtgataaataggtagaagatttgttaggataattttagtttttattatgtgtattttttattttttttgttatttattagttttttgtagtaatataattgttagttatattatttggaaattaatgtgtttttgtagtgaattatttatttttagtaaatttattgtattattattttaaatattgaaatttgattttattagatgtttagaatgatagttatagagtagaattagattttaatttttatgtataatatgtaaataaattaaggtgtagaaagttattgttttaaagttatataattaatagtttagtggtttttttagtgttaattatagtaattttagatttaagattgtttgatttaggaatggagagaaataaaataaaatgaatgtttattgaaatatatattttagatattaagatagatttttttgtgaaatattttaagatgtggatttgtatttttatttttaaatttgagtaaattt

SEQ ID NO: 372 - DNA, 3000 bp, Artificial Sequence
  Description of Artificial Sequence: Synthetic polynucleotide
atatttaaattgtatatttggtttgtaatatattatatatttaaaagaattattatttttttgaatattattaatattaataatagtattatagtgattaagagtggatttaaataaaggttggtttgaaatttaggtttgttatttattagtaagtttttaaaaattttgagtttttagtttttttatatgtgaaatggagaaaataaatttgtaaaattaattaaatttgtttatttatatttttttttttagtgtatattaattggtatttttcgttaggttagaatgtgtttttaattatgttttaaattcgttttgtgttaattttattgttagaattttttttattttgagaattagaaaaggaaatattatgtttggtaatgtttatattttttaaaataaatttgtaggaaagaatatttagtaagtgatgagagtagtaacgattgtttttattattttaaatttataatattattttttttagagttttttaagtattgtagataattttttatttattaaaaaataaattgtaattataagtatttagggttgatattgtttttgaattagatagtgtttatattagttgtataagattaatttaaagtagaggatgaaattttttttttgaattttttttagaacgtaatttagtgaatatattaaaattaaattttttttgaatgggagtaatttttacggattaatttgtaattttttagattatatttaaggtaatgtagaggttgttgtattataggttttgtgattagagattattggatttgtttttggaaaagttatttatgattttttgggttttggtttttttattttttatatcggtttaataatgattatcgtagagttgttatggaagttaaatgaatttatgtattataagtgattaatataatgattgatatttagtgatttattaataaattaaaatatttattattaatatgatagagaaggtgtcgttaaaatagataataggtttttggaagaggtgattaaatggatgtaaaatttatggattgtttatttcgtttatttttgttgtgttttttggttgtggtatatatacgtgtgggtataaaatcgtaaattttatgtagtcgcgtagtgtatgcgtagaaggtttagatacgaaatgttattttagtaatgtgtttagagaagttttgacgtcgttttggaagtaagtcgttgttgtttgatttttgggcgtttgggacggatgtttatatttgtatttagtagtattggaaggggtttaggtttttcgtagtatagtttatttttagatcgtttagttttttataatatatatttttacggaaaagggtattttttttcgttagaaaaagcgttttagtttggtttgggttggtttttattttacgttgttgtaagtaggcgaagttttttttgtttttttttttggggtaagtggaaaggagttcggtagggggttcgtagtggtttgtataggggaattgggtagcgagagagttttaggtaatttcgggggttgttttatagaagtaggtggggatcgatagtggtttttcggtttagggaggagagcgcggtcgcgggtttttttttttagtttggaggttgtagtcgttcgagtcggttcgggtgggggcggggtgggggcggcgcggagggtacggagattacggcggcgttattcgggatatttagggtttcgaggttttgggcggtttttacgcgagatcgtaaattatgataataggtagttattcgaggttaaataaaaacggagtgggtttttcgcgcgtcgtcgtttttcgcgtttttggcggtttttttcgaggttttcggcggttttacgagttcgtagtagtcggtggcgacgtcgttttcgttttatttttttgcgtaagtgcgaggttgtcggtagcgcggcgtacgtttcggtcgttttcggttttcgcgtaaaatttttattttgtttacgtgaagttgtcgttgttttagagagggggaaagagttgcgggaaaagtcggggagtgacgattgcggcggttgggcgcgtttttttattttttttttttttttttttttttttgtcgtagttcggagttttggttttttttttttttttttttttttcggagtcggttttttttttcgtttcgtttttttttcgtttgtgtacgttatttgttgtggggtggtcgaaggggatgttttgtttttattagaggtatagcgcgaaggggaaatttcgatattggaaggaacgagaataaatatttaattacggacgtattgaatcgcggttgggatagatatttcgggaattcgaggcggatcgggcgacgaggtgagtgatttttttttttaattttcgttttagggttttcgggggagtttgagttgagagaatttttaaatttttcgggaaagtgcgcgaggtttcgtcggggacgtcgagcgttgggtattgaggacgcgtagttggacggtgcgtgggcgtttgcgttttcggggggcgtttggaggtcgggtgttttacgtttgagggttcgggtcgttcggatcgtagcggtgttttttgttttagaagacgtttttaagttttaagggtttttttcgagtttgtttgtttttttcggggtcggcgcggagtttgcgcgtaacggagtttatttagtagtttagcgcgcggtttttatttgtatttcgtttttatttggtagaggcgcgagtatcggggttttttttatattttttttatgacgtgtattattttttgatgattttttagatggtttaggcgcgaggatgttgatttagagtttttcggagggttataggcgtttgggttttttcggtgtcgggtgcgtgtgtattttaaaggttcgcgttttaatttttaggtattgatcgggttttttaattgcggcgattttattttaatagtttttatgtggcgtggattgaatgtt

SEQ ID NO: 373 - DNA, 3000 bp, Artificial Sequence
  Description of Artificial Sequence: Synthetic polynucleotide
gatatttagtttacgttatataaaaattattaaagtgggatcgtcgtagttgaaaagttcgattagtgtttggagattagaacgcgagtttttaaagtatatacgtattcggtatcgggaaagtttaggcgtttgtgatttttcgaaggattttgggttagtattttcgcgtttggattatttagggggttattagaaagtaatatacgttataagaaagatgtgggggagatttcgatgttcgcgtttttgttaggtggaggcggggtgtaggtagaagtcgcgcgttggattgttggatgaatttcgttacgcgtaggtttcgcgtcgatttcggaagggataggtaggttcggaagggatttttggggtttggggacgttttttagggtagagagtatcgttgcggttcgagcggttcgggtttttaggcgtggggtattcggtttttaagcgtttttcggggacgtaggcgtttacgtatcgtttagttgcgcgtttttagtatttagcgttcggcgttttcggcggagtttcgcgtattttttcggaaagtttgggggtttttttaatttaggttttttcgggagttttggggcgggggttggaagaaggggttatttatttcgtcgttcggttcgtttcgggttttcgaagtgtttgttttagtcgcggtttagtgcgttcgtaattaagtatttattttcgttttttttagtgtcgaagtttttttttcgcgttgtgtttttggtgaaaataggatatttttttcggttattttataataaatagcgtatataagcgggggagaagcggggcggagggagaagtcggtttcgagggggaggaggaaaggagaggagttaaaatttcggattgcgataggggggaaaggagaagaaaagaaaatgagagagcgcgtttagtcgtcgtagtcgttatttttcggtttttttcgtagttttttttttttttttaaggtagcgataattttacgtggataggatggaagttttgcgcggaagtcgggaacggtcggagcgtgcgtcgcgttgtcggtagtttcgtatttgcgtagggaggtggggcgggggcgacgtcgttatcggttattgcgggttcgtgaggtcgtcgggggtttcgggggaggtcgttagggacgcggggggcggcggcgcgcgggggatttatttcgtttttatttgatttcgggtgattgtttattgttatggtttgcgatttcgcgtggggatcgtttagggtttcggggttttggatgtttcgggtggcgtcgtcgtaattttcgtgtttttcgcgtcgtttttatttcgtttttattcgggtcgattcgagcggttgtagtttttaggttgaggggagggattcgcgatcgcgtttttttttttgggtcggagagttattgtcgatttttatttgtttttgtggggtagttttcggaattgtttggaattttttcgttatttagtttttttgtgtaggttattgcgggttttttgtcggatttttttttatttattttaagggaggagatagaagggatttcgtttatttgtaataacgtgaaataaaaattaatttagattagattggggcgttttttttgacgggaggaaatattttttttcgtggagatatatgttatgaaggattaagcggtttggggataggttgtgttgcgaagggtttgggttttttttagtgttgttgggtgtaggtataggtattcgttttagacgtttaaaggttaggtagtaacgatttatttttaaggcggcgttagagtttttttaggtatattgttgaaatgatatttcgtgtttaagttttttgcgtatgtattacgcgattatataggatttacgattttatatttatacgtgtgtatgttataattaggggatatagtaaaggtagacggaataaataatttataaattttgtatttatttaattattttttttaaaaatttattgtttattttagcggtattttttttgttatattgataataaatgttttaatttattgataaattattgagtgttaattattgtattggttatttatggtatatgagtttatttaatttttatgataattttacggtggttattattaagtcggtataaaagatgaggaaattaaagtttaaagaattatgagtgatttttttaaagataaatttagtggtttttaattataaagtttatgatataataatttttatattattttaggtgtggtttaagagattatagattaattcgtagaaattatttttatttaaagaaagtttagttttaatatatttattaagttacgttttgaaaaaggtttagaaaaaagattttattttttattttaggttggttttatgtaattgatatgagtattgtttaatttaaaagtagtattaattttgaatatttatggttataatttattttttaatgagtggggaattatttataatgtttaagaggttttagaaaaggtggtgttgtaaatttaaaatgataaaggtagtcgttgttgtttttattatttattgggtgtttttttttgtagatttattttggagggtgtaggtattgttaggtataatgtttttttttttggtttttaaggtagaaagggttttggtagtggggttggtataaagcggatttggagtatggttgagagtatattttggtttaacgaggaatgttagttaatatatattggagagaaaaatatgaatggatagatttaattaattttgtagatttattttttttattttatatgtgagaaaattaagggtttagaatttttagaagtttgttaataaatggtagatttgagttttaagttagtttttatttaagtttatttttagttattgtgatgttattattagtattaatggtatttagaaaaatagtaatttttttaaatatgtaatatattataagttaaatatgtaatttaaatgt

SEQ ID NO: 374 - DNA, 2501 bp, Artificial Sequence
  Description of Artificial Sequence: Synthetic polynucleotide
gttatttttatgtgttttgtagttttttgaaggggcgtgggatttatcgatgttaattatttagtattatttttagattttaagaagttggggtgtgagttagtaattagtatagaaaagagatattaaaataagtttgagttggggagtgtttttttaattttagttttttggaagagattttttttttttttttgagatagagtttcgtttttattgtttaagttggagtgtagtggtacgatttcggtttatcgtaatttttttttttcgggtttaagcgattttttttttttagttttttgagtagttgggattatagatatgtatttgtaatttttattaaaaatataaaaattagtcgggcgtggtggcgtacgtttgtaattttagttattggggaggttgaggtaggagaatcgtttgaaattaggaggcggagattgtattaagatagtttgttttagttaaataatttggcgttagtgtaggaaaaggtggaaggtacggggttagtataggagggtttaatatttttaattttattaagttatattttggtaatttttgttttttacgagaagttttcgttgggtttgttttagcgttgttttgaggttttttttatgagtttcgatagggtagaggtcgttttgagcgttttttttttttttggtttaagagtggtttaaaagaaggatttttgattggaattggttattttgtgttattttttgatttttgatttcgttttaaagggggatgcgggggaggggttttggtaggggtggtttcgttttttttaggttcgtaagtttaggttttcgtttatcgggtttagtttattttgcggtcgtttagggaggtcgttggtattcgtgatttacgatttttttttcgagttttatcgaggttatagtcgtggtttcgtttttttatgtttgtttttcgttttttgttcgtgacgggcgttttcgaggattaatgagcgcgttgtatttatttttcgggcggggttaagcgtcgattaatcgtcgttcgggcgttcggtcgggtttaaacgttttaatcgttagcggcggcggggcgggtagagggtcggggatggtaggtttaattaacgggtgggtacgtcgttttcgcgaggaggcgtgttttgcggtcgggcgtgcggtgttcgcggcggcgtagggagggggagggaggtaaataagatggcggcggcgtgtcgggcgcggaagggggaggcggttcggggcgttcgcgagtgaggcgcggggcggcgaagggagcgcgggtggcggtatttgttgtcgcggttttggatgggttgggtttttttcgtcgtttcgttttttttatacgcgcggcggtcgcggcgagggggacgcgtcgttcggggttcggtattttcgggaatttttcggttcggagtttgcggtttgcgtcgtttcggtcgtcgggagtttcgtggagttttcgtcgtcgcgtcgtttcgcggatcggacgttgagggtattcggggcggggcgcgcgttcgggtagacgtttgcggggaggggggcgtttgtcgggtttcggcgattattttgggggtcgcgggtcggttcggggggcgtttagtgcgggttttcgcgggcgtcgggtagcgattagttttgagcggagttgttggtcgcggcgggaggtttttcggacgtttttagtttttcgaacgttcgttcgggtcggcgggagtcggcgtttttcgggaggttcgttcggtcgttcgcggcggagcgtttgtttttgggataggcggtgggatcggggcgtcgtcggagacgtttttagcgaagttgggttttttaggtgtgggggtttcggggggtagcgacgtcgcggattcggtttgtgggatgggcggttcggagaagattgcgttcggtcgtgtttatatttgttcgtgggtttgaggttttcggaggatgatttagtattgaaaagtttcggtcggtttttttagggttttcgaggacgaagttgattttgatcgggtcgttttttagttttgaggttcgggttttattggaattcgcgtttgagtcgtcgtttcggattttcggtgttcgtcggttcgtagattttgtatcgggtttggattcgtagtcgggattgacgtgtagaataatcgtttttgttggaagaagggttttttttttttttttggggtttttgttgtttttttttttttttttttttttgtaaaattttggagaagggaagtcggaatataaggaaggatcgtttattcgcggatttagggttggcggcgggattttaggattttgggtttagtatggaggtggtggattcgtagtagttgggtatgtttacggagggcgagttgatgtcggtgggtatggatacgtttatttatcgtatcgattttatcgaggttatttattagtcgcgtcgtaagcgggttaagtttatcggtaagtatttgatgggggatttgt

SEQ ID NO: 375 - DNA, 2501 bp, Artificial Sequence
  Description of Artificial Sequence: Synthetic polynucleotide
gtaggttttttattaggtatttgtcgatgagtttggttcgtttgcggcgcggttggtagatgatttcggtggagtcgatgcggtggatgaacgtgtttatatttatcgatattagttcgtttttcgtgaatatgtttagttgttgcgggtttattatttttatgttggatttagggttttggagtttcgtcgttagttttgagttcgcgggtgagcggtttttttttgtgtttcgattttttttttttaaaattttataaagaaaaaagaaaaaaaaaaggtaataaaaattttaaaaggaagggaaaaattttttttttaatagaaacgattgttttatacgttagtttcggttgcgagtttaagttcggtgtagggtttgcggatcggcgggtatcgggggttcgggacggcggtttagacgcgagttttagtgggattcgggttttagaattgggagacggttcggttagggttaatttcgttttcggggattttggggaggtcggtcggggttttttagtgttaggttatttttcggggattttaggtttacggataagtatgaatacggtcgagcgtagtttttttcgggtcgtttattttataggtcgggttcgcgacgtcgttatttttcgggatttttatatttggagagtttaatttcgttgggggcgttttcggcgacgtttcggttttatcgtttgttttaggagtaaacgtttcgtcgcggacgatcgagcggatttttcggggggcgtcgattttcgtcggttcgggcgagcgttcggggggttgggggcgttcgggaggtttttcgtcgcggttaatagtttcgtttagggttggtcgttgttcggcgttcgcgagggttcgtattgggcgtttttcgagtcggttcgcgatttttaaggtggtcgtcggggttcggtaggcgttttttttttcgtaaacgtttgttcgagcgcgcgtttcgtttcgagtgtttttagcgttcggttcgcggggcggcgcggcggcgggggttttacggggttttcggcggtcgaggcggcgtaggtcgtaggtttcgggtcggggggttttcgaaggtgtcgggtttcgggcggcgcgtttttttcgtcgcggtcgtcgcgcgtgtggaggaggcggagcggcgaggggggtttagtttatttaaggtcgcggtagtaagtgtcgttattcgcgtttttttcgtcgtttcgcgttttattcgcgggcgtttcgggtcgtttttttttttcgcgttcgatacgtcgtcgttattttgtttatttttttttttttttttgcgtcgtcgcggatatcgtacgttcggtcgtagggtacgttttttcgcgaggacgacgtgtttattcgttggttgaatttgttattttcggttttttgttcgtttcgtcgtcgttgacgattggagcgtttggattcggtcgggcgttcgagcggcgattggtcggcgtttggtttcgttcgaggggtggatatagcgcgtttattggttttcggagacgttcgttacgggtagggggcgggaagtaggtatggggagacgaggttacggttgtgatttcggtggggttcgggaagggggtcgtaggttacgggtgttaacggtttttttgaacggtcgtagggtgggttgagttcggtgggcgggaatttgggtttgcggatttggaaggagcggggttatttttattagagtttttttttcgtatttttttttggggcgaggttaagggttaaaaagtaatataaagtggttaattttagttaaaaattttttttttgagttatttttggattaggggaaagagaaacgtttagggcggtttttgttttatcggaatttatgggggaagttttaggatagcgttgggataagtttagcgggggtttttcgtgaaaaataagagttgttaaaatatggtttgataaggttgaaaatattgaatttttttgtgttagtttcgtgttttttatttttttttgtattagcgttaggttgtttagttggaataaattattttggtataattttcgttttttggttttaagcgatttttttgttttagtttttttagtagttgagattataggcgtgcgttattacgttcggttaatttttgtatttttagtagaaattataggtgtatgtttgtaattttagttatttagaaggttgagggaggagaatcgtttgaattcgggaggaggaggttgcggtgagtcgagatcgtgttattgtattttagtttgggtaataagagcgaaattttgttttaaaaaaaaaaaaaagattttttttagaaaattgaagttgaaggaatattttttaatttaaatttattttggtattttttttttgtattgattgttggtttatattttaattttttggaatttggagataatgttggataattggtatcggtaggttttacgtttttttagagaattgtaggatatatggaagtgat

SEQ ID NO: 376 - DNA, 2501 bp, Artificial Sequence
  Description of Artificial Sequence: Synthetic polynucleotide
ggaggatagaaatataaattaaagaatgatataaataattataaagttatagttgttaaaagaaaagtatatggtgttaagagaacgtgtaatataagatttatttatggaggtgagggaaagtttgtttattaaagaagttatgatttaatttacgaagattaggagttggttgggtgaagaaaaaaaggttagaggaaggaagtttatattggggaaggttttaagtataaagggtaggaggattatagaggtatatttacgaaatttggagaaggtttttagtaagtaaggagaagttaaatgaaagtttacgggagagttggaggtttgaagatacgtttaaggatttggtttttattttttttttattttaagagtagtgggaagttattaaatgattttaattagagggttggtataattagttttgtattttgaaaagttgaatttagttttcgtttgagaaattgagtgaaagagtttagaacggtcgtggttgagggtgattcgtgggagatttttatataagttatggtagtggtatgggttggtggtagaagagggaatagggagaagatttggaatttaatttttttttattgataaagttattttagttttggtaaggtaattaattggtgggaaagaagatgtttagtttttttgattttattgtattttttgtatttttaatatgagtattgggaagtggtaaaatatttagaggtagtttgggtgttaggtggagtatgagttaaaattttaggatgaagtaaatgaatatttagaatgataggaaagatttgggagttgggtttgggggagggttatttatttttattttttggagattttggtataaatttttgtttttgtaattttttttttaggtaaaggaatttattaaatgaattgttagaagatttattgattagagggttgtatagaattatatttttgagagtgggaagtaggttgattatatagtttattatttaattaggatatatttgaaagagaaagggggttttattaatatttaaattataaaatatgtatattaggaatgttttgggtaaatttggttgttttagtaagaaaggaaatttgaaagtttatattgttttgtttttatgttatttcgtttgtatatgagagggtaagtattttttttttttatttgtattaagggaataaaagtataagtatttaggtgatttttaatttatttttaattttatagtttttgttatattttatatattttgaaaattatattttttattattattatttcgtgataggtgattatttataattatttattgatttagtttcgggaagaggcggtgtaaaatgggacgttttatttaggtgtttattagaaatgtagaatttttgtttgttttttagatttattgaattagaatttgtatttttaaataagatttttaggtgattaatatgtatattaaaatttgagaaaaatttttagatttcgatttaaagaaaaatattttataatttgatagtgtatgtatatatatatatgtatatagatataattgaagtataaatttaatgaagtagaatttatcgttattattttatttgggaaagaaatgtgttcgcgatttaatagattggagtatttatttttggattttaatttgtaatttgaaaacgtatttttaaagtatttaggagtaatttgaagaaagttgaggggaggcggtagatgttttgatttattagggaaaacgtggacgttttttgttgttattttgtgaattgtgtgtatttagttatttttgagtaaatatttggagcgaggaatttttgagtggtgtgggagggcggtgaggggtagttgaaagtcggttaaagttttcggaggggttggtttaggaaatatgattggtagttacgagagagttaggggttggacgtcgaggagagggagaaggttttcgggcggagagaggttttgtttagttgttggcgaggagttttttgtttttttcgtagcgttgagttgaagttgagtgagttattcgcgcgtacggagcgacgatattttcgcgcgtgtattcgttcgggataggagtcggatttttgtgtagtttttttcggtcgtcgggggttttttcgcgtttcgtcggtttttaggtttttttttggttggcgagcgggcgttatatttggttcgtatatttgcgttgtcggttcggcgcggggttcggagagggcgcggcgcggaggcgtagttaggggttcgggaaggcgtcgttcgttgcgttgggggttcggtttatgacgagtagcggggtttgttatgggtcgggggttgtttaggggtttgtggtcgttgtatatcgttttgtggacgcgtatcgttagtacgattttatcgtacgtttagaagtcgggtgagtggtttttagttcgggttcggcggggcgtcgggggtttttttggggttttcgttttttcgttgt

SEQ ID NO: 377 - DNA, 2501 bp, Artificial Sequence
  Description of Artificial Sequence: Synthetic polynucleotide
gtagcggagaggcggggattttaggaagattttcggcgtttcgtcgagttcgggttggggattatttattcgatttttgaacgtgcggtgggatcgtgttggcgatacgcgtttataggacgatgtgtagcggttataggtttttgagtagttttcgatttatggtagatttcgttgttcgttatagatcgagtttttagcgtagcggacggcgttttttcggatttttggttgcgttttcgcgtcgcgtttttttcggatttcgcgtcgggtcggtagcgtagatgtgcgggttagatgtggcgttcgttcgttagttaggagggggtttggaggtcggcgaggcgcggggaggttttcggcggtcgagggaagttgtataggagttcggtttttgtttcgagcgggtgtacgcgcgggggtgtcgtcgtttcgtgcgcgcgagtgatttatttaattttaatttagcgttgcgggggaaataggaaatttttcgttaatagttgggtaggattttttttcgttcgagagtttttttttttttttcgacgtttagtttttagttttttcgtagttgttaattatgttttttagattagttttttcgagagttttggtcgatttttagttgttttttatcgtttttttatattatttaggagtttttcgttttaagtatttatttaagaatgattaagtgtatatagtttataaagtaataatagaaaacgtttacgttttttttagtagattagaatatttgtcgtttttttttagttttttttagattgtttttaggtgttttagagatgcgtttttaaattgtaagttgagatttaggagtgaatattttaatttattgagtcgcgagtatattttttttttaaataaaatagtaacggtaaattttattttattaaatttgtgttttagttgtgtttatatgtatgtatgtatgtgtatatattgttaagttgtaaaatgtttttttttaggtcgaagtttagaggttttttttaagttttaatgtatatattgattatttggaaattttatttaaaaatgtagattttaatttagtaggtttaggaggtaggtagagattttgtatttttaatgagtatttggatagagcgttttattttgtatcgttttttttcgggattgagttagtgagtaattgtaaatgattatttattacgaagtgatagtggtgggaaatgtaatttttagaatgtatagagtatagtagaaattgtaaaattaaaagtgggttgggagttatttgaatgtttgtgtttttatttttttaatgtaggtgaagaaagagaatatttatttttttatgtgtaaacggggtaatatgggagtagaatagtataaatttttaaatttttttttttgttagggtaattagatttgtttaagatatttttggtgtatatgttttgtagtttaaatattaatagaatttttttttttttttagatatgttttgattggataataaattatgtgattaatttattttttatttttaaagatatgattttgtatagttttttggttagtagattttttagtaatttatttaatgaatttttttatttgagaggaagattgtagaggtaagggtttgtgttagggtttttagggaataaaggtaaatagtttttttttaaatttaatttttaaattttttttgttattttaagtgtttatttgttttattttggaattttaatttatgttttatttagtatttaagttgtttttggatgttttgttattttttagtatttatgttgaagatgtagaaagtgtagtgaaattaggagggttaggtatttttttttttattaattaattgttttgttaaagttggagtgattttgttaatggaggaagattgagttttaaattttttttttatttttttttttgttattagtttatgttattgttatggtttgtgtaggagttttttacgagttatttttagttacggtcgttttgggtttttttatttagttttttaaacgagagttgaatttagttttttaaaatataaaattagttatattaattttttgattaaaattatttaatggttttttattgtttttgagataaagagaagataaaaattagatttttgaacgtgtttttaagtttttaattttttcgtaaatttttatttggtttttttttgtttattgaaagttttttttaaatttcgtgaatatgtttttgtaatttttttattttttatgtttagagttttttttagtgtggattttttttttttgatttttttttttttatttagttaatttttggttttcgtggattgaattataatttttttgatgggtaagtttttttttatttttatgagtagattttgtattatacgtttttttggtattatatgttttttttttaatagttgtaattttataattatttgtgttattttttaatttatatttttatttttt

SEQ ID NO: 378 - DNA, 1508 bp, Artificial Sequence
  Description of Artificial Sequence: Synthetic polynucleotide
attttataattataaatatttagtgtattttgtaaatatggtataatttgttggtataaaattttattgttttagaaaatatcggtaataaaattatagaaaagttaaagatttttattttttatttcgaagcgtttgggagatattttagaaacggatgggaaatgttaaattttgtatgtttgtttatttttttttttatatcgattagatgtaaacgagtgttattaaaagtatattataggtatttatatagattttttttataagggatttataaagtttagatgtgaaatgtattttaaagggtttttagtcgttttttatttttttttttgtgaaatagggaagatatatgtgtttttaagggtagagatggaatttgggttaatgggtcggggggtggggggaagttggaagggattgttttaggatatggtaggatagtggattgtttttgtcgttttgttgtttatatcggggttttttgtaggcgcgtcggttttttttttttttgttgagaagaagttttgttaaaatattcgtttttttcgggaattttttcgtgggtttaaagcgggaaaatgttgttttaggtttaaaataatttgtttaagttttttagcgcgggagaaacgtttttattcgttttttgttttcgggggtgtttttcgttttttgttgttagaattttggggagtgtttagattcggggtagtatacgttcgggttaatcgcgagtagaataaatttttggtgggcggttaggaagtttttttttagttatcgtttttttttagtgtttttttttttttttatataatataagattttttttttttagtttttttaaagtatagtttaaggaaatttttttatagtttttatttagttacgggttagtatgtttgggggtaaatacgtagattcggaggtaggtattcgtgggggggcgtcggttcgggcgtgcggggaagtgttcgtttttgttatttgtttttttaaatatttcgattgttgatttggttttttagttttttttttatttcggagtatttttttggcgttggtatcgttgaagaatgggtttgggcggggaggtgaagagaagttaggaatgttttatgtttttttaatggagagggggtttcgggagtttttgagttaggaggatacggaaaaggggattggggttttgagattgggtttgttgggtttaagacgcgttttttggatgggtttaggatgtttttttgtcgcgggaatttcgcggttcggttttgtttgttgggggttcgaaaaagtggattgtagggtggaaggtgttatttattcgagttttggggatagttttcgggatttttcgttaagcgtttaaaacggtaggtttttaagcggcgcgcggtgtttttgtattttttaaaatttttgaaatattttaaaaatttttttgtattttggcgtttggtagggttttttaaaaaaagtaaattttttttttaaatgta

SEQ ID NO: 379 - DNA, 1508 bp, Artificial Sequence
  Description of Artificial Sequence: Synthetic polynucleotide
tgtatttgggagggaggtttattttttttggaaaattttgttagacgttaagatgtagaaggatttttgagatgttttaagaattttggaaagtgtaaaaatatcgcgcgtcgtttggggatttgtcgttttgggcgtttggcggagagtttcggggattgtttttaggattcgggtaaataatattttttattttgtaatttattttttcgaatttttagtaggtagggtcggatcgcggggttttcgcgataggggagtattttagatttatttagaaaacgcgttttgggtttaatagatttaattttaggattttaattttttttttcgtgtttttttagtttaggggttttcgaggttttttttttattaggaaaatataaaatatttttggtttttttttattttttcgtttaggtttattttttagcggtgttaacgttagaggagtgtttcgaagtggaaagagggttggggggttagattagtagtcgggatatttggagaggtagatagtagaagcggatattttttcgtacgttcgagtcggcgtttttttacggatgtttattttcgagtttacgtatttgtttttagatatgttggttcgtggttggatgaaaattgtgaggaggtttttttgggttgtgttttaagggaattgaggaaggaagattttgtattgtatggggggaaaaaaaggtattggaggggggcggtggttgggagggagttttttggtcgtttattaaaggtttgttttgttcgcggttggttcggacgtgtgttgtttcgggtttaggtattttttaaggttttggtagtagagggcggggagtattttcgggggtagagagcgagtaagaacgtttttttcgcgttggggggtttggatagattattttaaatttgaggtaatattttttcgttttgaatttacgggggggttttcgggggaggcggatgttttggtagggtttttttttagtagggggggagggagtcgacgcgtttgtagagagtttcggtatgggtaataaggcggtagaaataatttattattttgttatgttttaaggtagttttttttaatttttttttatttttcggtttattggtttaagttttatttttgtttttgaaaatatatgtgttttttttgttttatagagggagggatgagagacggttaggaattttttagggtatattttatatttaaattttgtggattttttatggaaggaatttgtgtgggtgtttgtggtgtatttttggtgatattcgtttatatttagtcggtgtggaaagaaaaataagtaggtatgtagaatttaatattttttattcgtttttgaaatgttttttaaacgtttcgaaataagaaatgaagatttttaatttttttataattttattatcgatattttttggaataatggaattttatgttaataggttatgttatatttgtaaaatatattaaatgtttataattgtagaat

SEQ ID NO: 380 - DNA, 286 bp, Artificial Sequence
  Description of Artificial Sequence: Synthetic polynucleotide
tttgtattaggttggaagtggtcgttagtttttcgtgtaattttattttttggaaaagtggaattagttggtattgtttagcgtgatttgtgaggttgagttttaatagtttaaagaagtaaatgggatgttattttcgcggggttcgtttttcgcgaggtgtttatttcgtatttgttatgtaaaacgagggagcgttaggaaggaattcgttttgtaaagttattggttttggttattagtttttatttaatgttttcgtgatgttgttgttgatttatttggg

SEQ ID NO: 381 - DNA, 286 bp, Artificial Sequence
  Description of Artificial Sequence: Synthetic polynucleotide
tttaaatagattagtagtagtattacgaaagtattgggtagaggttgatgattaggattaatggttttataagacggatttttttttaacgttttttcgttttgtatggtagatacggggtgagtatttcgcgaggagcgagtttcgcggaggtggtattttatttgtttttttggattgttggggtttagttttataaattacgttgggtaatgttagttgattttatttttttagagaatggaattgtacgggggattggcggttatttttagtttagtgtaaa

SEQ ID NO: 382 - DNA, 2501 bp, Artificial Sequence
  Description of Artificial Sequence: Synthetic polynucleotide
tttatatatattatgttttttaaatgatatattagttttttgagggtaatttatattggtaatagtttttagatgtggaaattgtgaagataatgttggtgatgtggaagtaatataaattttggagttttttagatttaggtttgaatgttagattgttttttatttagagtaattttagagtattattttttattttaatttttttttaggtttttttgtgtttatgtgttttttttatttttgtttattgtttatttagtgatttttgtatttttttttattgttagtgtgtagatatatagtttttttggttttgagatttatgttaattttattttattattttgttagtttatttaatttttattgagtaatgttagttgaaagttgtggtgggattaaatgttgtaatgagtatttaaatgaggttgaagtatttacgtattttatttatatatggtgaggtatatttaaggaaggttgtagttattaaaattttaggaaataattttttatttttttaggtgaaagggtttttaggtttttgtgttttggaaggtttatttatagttattttttaaatgataatgcgattgatgagtttagagtttagtttaaatagtaatggattggaagattagtttaggttttattaatgtggaatatagaataaattatgtttttgttttagtttgtttatttgtgaaatagagtttattatatttagttttttttgtttttaggtttgagttattttttttggttaaggtaagtaaatgtttatgatgtttggttgtgtataagataaagttataataaagttataatttattttttttttgtagaagattgtaaaaagtaaaagagatttaggtaaaaatttcggaatgatttttggaatagagagtttttttagaattagaagttaaaggaatttaaaatatagggaggtttagggtttttattgatataaaggaaagatgttttttttataggtttacgtttatattttttttttttttttatttttatttgtatttttatttttatatagggtttatgggattttttttataaaagagtagttgtagtaatttatattattttttacgtttggttgtttattaagaggcgaaaagtagttttatataggttttatttttggatagttttagttgtaaagtttaaaatatgcgaaggtaatttggaaaagtaagcggttgtatataaagtaaacgtttatagagttttggataaaattgagcgtttatgtgtatatggtaagtgtttttagtgtttgtgtgtttatttgtttgtttgggtgattttgtttttgagagtttggatgagaaatgtatggttaaaggtaattttagataggaagaaaggtagagaagagggtagaaatgatttttgatttttggggttgagggtttttagagtaaatggtataatgttacgaggttcgatttatttttatgacggaatttaaggttttagtaagtatttgttggtttggttatggtttgttttttagtttgtaggagatttttttatttttttatttgcgcgtttttattagttttgaaaagaatttttggtagttaggagtaggtatttttatcgttttttttttttttttttcgtttttattttgttggttttttagattgggttttggaattaaatttggtgagtgttggtttttaggaaatttggagttttggcgtttaaattttggtttaggaaagtaggagttatttaggaagtaggggttttttagggttagagttagttttttttgttttcgtttacgttgcgttagtatttgtttttttaaagttattaggtaggcgttagcgcgcggtgaggggaggggagaaaaggaaaggggaggggagggaaaaggaggtgggaaggtaaggaggtcggttcggtgggggcgggattcgattcgtaaattgttgtatttgttttttattttttagcgtttttttcgagatttcggggagttagtttgttgggagagcgggacggttcggagtaagtttagaggtagaggaggcgatagagggaaaaagggtcgagttagtcgttttagtgttgtataggagtcgaagggacgtattacgttagttttagttcggttttagcgatagttaacgttttttgtagcgcggcggtttcgaagtcgtcgttcggagttgttttttttttttcggtgaagtttttaaaagttgttaaagattcggaggaagtaaggaaagtgtttggtaggattgacggttgtttttgttttttttttttttatttcgtttttttttattttgttttttttttttttttcgttttttttttcgtagttgttttagtcggttatttttagttaattttttttattatttttttttttattcgttttttcgttttcgtcggtttagcgttgttagttcgagtttgtagagaggtaattttttttggttgcgagcgggcgagtt

SEQ ID NO: 383 - DNA, 2501 bp, Artificial Sequence
  Description of Artificial Sequence: Synthetic polynucleotide
agttcgttcgttcgtagttaaagggagttatttttttgtaaattcgggttggtagcgttgggtcgacgggggcgggggggcgggtggggagaagggtggtgaggggggttggttgagagtagtcgattgaggtagttgcgggagagaagacgggggagggggggaaggtagggtggggggaggcggggtggagaggaggaggataaaggtagtcgttagttttattaggtattttttttgtttttttcgagtttttagtagtttttaaaaattttatcgaagaggaaagggtagtttcgggcggcggtttcgaagtcgtcgcgttgtaagaggcgttggttgtcgttggagtcgggttggggttggcgtggtgcgttttttcggtttttgtatagtattggagcggttagttcggttttttttttttttgtcgttttttttgtttttgggtttgtttcggatcgtttcgtttttttagtaagttggtttttcgggatttcggagggggcgttgggaggtggagagtaaatgtaatagtttgcgagtcgggtttcgtttttatcgggtcggtttttttgtttttttattttttttttttttttttttttttttttttttttttttttttttatcgcgcgttaacgtttgtttagtggttttggagaaataagtgttggcgtagcgtgggcgagggtaggagaggttagttttagttttggaggatttttgttttttgaatagtttttgtttttttaaattaaggtttaggcgttagggttttagattttttggaggttagtatttattaaatttggttttaaagtttaatttaaaaaattaatagggtggaggcgagggagggaggaaaaggacgataggaatatttgtttttggttgttaggggttttttttaggattgataagagcgcgtagatgggagagtgggagagttttttataaattgaggagtaagttatgattaagttagtagatatttgttgaaattttagatttcgttatagggatagatcgggtttcgtggtattgtgttatttgttttaggaatttttagttttaagaattagaggttatttttatttttttttttgtttttttttttgtttggaattgtttttaattatgtattttttatttagatttttaaaggtaaaattatttagataagtaggtaaatatataaatattaaaaatatttgttatgtatatataggcgtttaattttgtttagagttttgtaaacgtttgttttgtatgtagtcgtttgtttttttaagttgttttcgtatattttaaattttataattggaattatttaaggatagaatttatatagggttgtttttcgttttttgatggatagttaggcgtagaggatgatgtgggttattgtaattgtttttttgtggaggaggttttataagttttgtgtaaaggtggagatgtaagtgggaatggaaagagagagaaaatgtaaacgtaaatttataaggaaaatattttttttttatgttagtagagattttgggtttttttatgttttaaatttttttgatttttgattttggggaggttttttgttttaaaagttatttcgagatttttgtttgggttttttttgttttttgtagttttttatagagaaaagatgggttgtagttttgttgtagttttattttgtgtatagttaaatattataggtatttatttattttgattaaagaaggtaatttaaatttaaaggtaaggaagattggatatgataggttttattttatagatgaataggttgaaataaggatataatttgttttatgttttatattagtaaaatttaaattagttttttagtttattgttatttgagttagattttagatttattaatcgtattgttatttgggaaatggttataaatgaattttttagaatataaaggtttgaagatttttttatttgaggaggtgaaaaattattttttgagattttaatggttatagttttttttgaatatattttattatatgtaagtagaatgcgtagatattttaattttatttgaatatttattgtaatatttaattttattataatttttaattagtattgtttaataggaattgagtgggttggtaggatggtagaatggaattaatataggttttagagttaggagaattatgtgtttatatattaatagtgaaggaaggtgtaaaaattattgaatgaataatggataggagtgaagaggatatatagatataaagaggtttgaaaaaaaattaaggtgagaaataatgttttgaagttattttgaataaaaagtagtttgatatttaaatttgggtttgaaagattttaaagtttatgttgtttttatattattaatattgtttttatagtttttatatttgaaaattgttgttaatataagttatttttagaaggttagtgtgttatttaaaagatataatgtgtataga

SEQ ID NO: 384 - DNA, 2448 bp, Artificial Sequence
  Description of Artificial Sequence: Synthetic polynucleotide
ttgttttgtttttacgataaaagttaacgggtttttagtatttttattaaaaaatagttacgtagatagtgttttggtggttttgtttcgtattttaattttggggtgggggaaaggggttaacgttttcgtagttttaaatcgggttattatttgtttatcgagtcgaatatgatgcggttttgttcggcgcgttttcgttggttttgcgttcgcgttattttagtagggttcgtagtaggtgaaaggtgaggttaatggatagagaagggttgtttcgtcgcggtcgttcgtttgtcgtttcgagttttaatcggtcgggtttcgcgcgggcgagaagcgttcgttagtagtaagaggagcgcgcgggtttcgtattttggtttcgtgtttcggggttttagcgtagattcgggttttggattcggtcgtttcggggtttttttggttgtttttagggtatagttgtattaggagtagtagcgcggttagtagcgttgcgtttcgtttgttttatggtgtcgtcggttttggatatataggggtagcgtagggtgaggtgcgtttgggatagttgtaggcgtcgttttttttttcgcgttcgttcggcgattttttcggtcgtcgtttaatgttcgtagtttgttttttagttttagttattgcgttagtgttgttttattttttttatttagttttttttttcggaggagcgtggtggttgagttgagcggagttttggtgtagggggaggttgggcggacgttttgagttatttataggttgtcggcgagcgtttgtacggtttaagattgagttttagtttttgtttttcggggtaggttgaagacgttttggggaatatagggtttgtttcggcgtgtcgttagttttatatagtgttaggatagtttcgattgacgttagcgaagaatatgtattgattgtagaagtaatgatagttatagtttcgagtttgacggttggcgggtttcggagggcgtatttttttatattagttttcgtgtttttgggcgtagcgttggaagtagtattggacgtaggaaagcgagaagtcggttggggcgtaaagattgttttgggatttacgggagttttatcgtttcgtttagaatagttagtaatgattagggtcgtttttagattagattagttcgggtcgcgtgttttgatatacgaaagggaggcgggatcgtgaggttgtttatggtgttgatttcgttttttgtttttagaagtggttagaaatgtgagaacgttgtgtcgttggaatttattgtttttttgtagttattagttttgtaaatgtaggtattaggagtttatcgttggtatttagttaatatagtgggatttattgagaggtagtttgttataattaaagttttttagtatttttatttttttttagttttaggatttaaatttgtagggttgtttgataggtattatgtaatagagggtttttagtattcgagtgtttttagattataaatggttggtttatttgtttttgagtttgttaaagtagtttagtaaagtttagttttttttttgggaattatagtagtagtgtaattttgtttatgagtagtaaagaaatatgggtttaagtttttgttaatttttggtgtggataggttattttttttttattaattttagggtttttatttgtaagattgggtttggttaggcgcggtggtttacgtttgtaattttaatattttgggaggtcgaggtaggcggattacgaggttagtagtttgaaattagtttggttaatatggcgaaattttatttttattaaaaatataaaaattagtcgggcgtggcggtatgcgtttgtggttttagttatttaggaggttgaggtaggagaattgtttgaatttaggaggcggaagttgtagtgaggtaagatcgcgttattgtattttagtttgggagatagagtaagattttgttttaaaaaaaaaaaaaaaaaaaaaaaaaaaaattgggtttggtggttttttggtttttttttagttttagaaatgattttttaatagttttttgtttaaaaatttatttattattattgtagatttcggattatatatttaataatatatttattgaggtattatataaagggtttcgggagtttttaaagagttggagttataagaagtttaggtagggttagagtaataaatgtgtttatgaagagtggggatgagtggtatttgttgggatatgggtgtaaagttgataaggttatgaaggtttaatagatatttatggagtgtttagtatgtggtgggaataagattattattaagggttttaaagtagttagtgtatattttagagtgaagaggggtattgtagggtgttagtttttttaagttttgatcggtaatttaatttcgtggaaattgg

SEQ ID NO: 385 - DNA, 2448 bp, Artificial Sequence
  Description of Artificial Sequence: Synthetic polynucleotide
ttagtttttacggggttgggttgtcggttagagtttaagaggattagtattttgtaatgtttttttttattttaaaatgtatattgattgttttagagtttttgataatagttttatttttattatatattaggtattttataaatatttgttgaatttttatgattttattaattttatatttatattttagtaaatgttatttatttttattttttatagatatatttgttattttaattttgtttaggttttttgtagttttagttttttagagattttcggaattttttatatggtgttttagtaaatatgttattaaatatgtaattcggaatttgtagtggtaatgagtaagtttttaagtagaaaattattggggagttatttttagagttggaaagaagttaagagattattaagtttaatttttttttttttttttttttttttttttgagatagggttttgttttgttttttaggttggagtgtagtggcgcgattttgttttattgtagttttcgttttttgggtttaagtagtttttttgttttagttttttgagtagttgggattataggcgtatatcgttacgttcggttaatttttgtatttttagtagagatggggtttcgttatattggttaggttggttttaaattattgatttcgtgattcgtttgtttcggttttttaaagtgttgggattataggcgtgagttatcgcgtttggttaagtttagttttataaatgaggattttgaggttggtaggagggaggtgatttgtttatattaggagttagtagaaatttgaatttatatttttttgttgtttatgggtagagttatattgttgttatgatttttaggagagaaattgaattttgttaaattattttggtaaatttaaaagtagatgggttagttatttgtggtttgaaagtattcggatgttagagattttttgttatatggtgtttgttagatagttttataaatttggattttggggttggaaaaagataagaatgttgggagattttggttgtggtagattgttttttagtgggttttattgtgttggttgagtgttagcggtggatttttgatgtttgtatttgtagaattgatagttgtagggaggtagtgggttttagcggtatagcgtttttatatttttggttatttttagaggtagaggacggggttagtattatggatagttttacggtttcgtttttttttcgtgtgttagaatacgcgattcggattagtttggtttggggacggttttagttattgttggttgttttaagcggggcgatgggattttcgtgggttttagagtagtttttacgttttagtcggtttttcgtttttttgcgtttagtgttgtttttagcgttacgtttaggggtacgaaggttggtgtagggaggtgcgtttttcggggttcgttagtcgttagattcgaagttgtggttgttattgtttttataattagtgtatgtttttcgttgacgttagtcggagttgttttggtattatataaggttggcgatacgtcgggatagattttgtgttttttaaggcgtttttagtttgtttcgagggatagagattggagtttaattttggatcgtatagacgttcgtcgataatttgtgagtggtttagagcgttcgtttagtttttttttgtattaggatttcgtttagtttagttattacgttttttcggggagggaggttgggtggaagggatggaatagtattggcgtagtggttggggttggagggtaggttgcgggtattgggcggcggtcggaggggtcgtcgggcgagcgcggggaggggagcggcgtttgtagttgttttaggcgtattttattttgcgttgtttttgtgtgtttagggtcggcggtattatgaggtaggcgggacgtagcgttgttggtcgcgttgttgtttttggtatagttgtgttttgggagtagttagaggagtttcgaggcggtcgggtttaggattcgagtttgcgttggagtttcggggtacggaattagggtgcggggttcgcgcgttttttttgttgttggcggacgtttttcgttcgcgcggggttcggtcgattgggattcgggacggtaggcgagcggtcgcggcgggataatttttttttgtttattgattttattttttatttgttgcggattttgttggagtggcgcggacgtagagttagcgggagcgcgtcgagtagaatcgtattatattcgattcggtgggtaagtgatggttcggtttggggttgcgaaaacgttgattttttttttttattttagagttgggatgcggggtagagttattagggtattgtttgcgtgattattttttaataaaagtattgaagattcgttggtttttgtcgtagaggtagggtag

SEQ ID NO: 386 - DNA, 2344 bp, Artificial Sequence
  Description of Artificial Sequence: Synthetic polynucleotide
gtttggtatatttaagatttttacggaggtttagttttatatttttttttatttttttaggttggtttttttttgttgtcgacgcgtgggagtttagagagcggtttttcgttttcgcgggatttttggagaggttcggagagtcggttttcgaaacgcgttttttttttttttttttttttttttttttttttttcgttttttcggttttattattattatcgttattacgtttttttttattattttttttattttatattattattattattattattattattatttcgtcggtcggttttaggtttcgacgttttgggtttttttcggggtggggcgggttgttttaggggggtttatcgttatttatgaaggggtggagtttgtttgttcgtgggtttttataagggcggttggttggttggttggttgttcgggtaggttttttggttgtatttgtcgtagtgtatagttcggttgaggtgtacgggagttcgtcggtttttttttgttcgcgttcgttcgtgaaattgcggtcggggtttatcgcgatggttttttcgatattttcggatagtatttttttcgcggaagttcggggacgaggacggcgacggagattcgtttggatttcgagttaaagcgaggttttgcgagtttgttttgagcggaattcgtattcgggtatcgttattagagaacggttggtttaggttatcggtatttcggagtttagggtttagatttggttttagaatgagaggttacgttagttgaggtagtatcggcgggaatttcggttttggttcgggagacgcggttcgttagaaggtcggcgaaagcggatcgtcgttatcggattttagatcgttttgttttttcgagtttttgagaaggatcgttttttaggtatcgtcgttcgggaggagttggttagagagacgggtttttcggagtttaggatttagatttggttttagaatcgaagggttaggtttcgggatagggtggtagggcgttcgcgtaggtaggcggtttgtgtagcgcggttttcggcgggggttattttgttttttcgtgggtcgttttcgtttatatcggcgcgtggggaacggggtttttcgtattttacgtgttttgcgcgtttggggtttttttatagggggttttcgtgagttaggtagcgagggtcgttttcgcgttgtagtttagttaggtcgcgtcggtagaggggattttttaatttgtttcggcgcgcggggatttcgtttacgtcgtttcggttttttcggacggggcgtttttttatttttaggtttttcggtggttttcgtattcggggtaaaagtcgggaggatcgggattcgtagcgcgacggtttgtcgggtttttgcgcggtggtatagtttgggttcgtttaagcggggtcgtagggttaaggggtgtttgcgttatttacgttttaggggagttcgtggtggggttggggtcggggtttttaggtcgtcggggcggcgtgggaattttaagtcggggtagttttatttttttagttcgcgttttcggacgttttcgcgcggtaggggtagatgtaaggtatttcggcgtttttttaggcgttttaggagtcggcgttttggtttgtatttttttgcggtttgttgttggatgagtttttggcgagttcggagtttttgtagtaggcgtaattttttttagaaacggaggtttcgggggagttggaggtttcggaagaggtcgtttcgttggaagtattttttagcgaggaagaatatcgggttttgttggaggagttttaggacgcggggttgggacggggtcgggtggttcggggtagggcggtggtttttttttcgcggggaacgtttggttggttacggaggggcgtgttttcgtttcgttttttttatcgggttgatcggtttgggatttttgttttttaggtttaggttcggtgagagattttatatagcggagaattgttatttttttttgggtatttcggggattttagagtcggtttaggtattagtaggtgggtcgtttattgcgtacgcgcgggtttgcgggtagtcgtttgggttgtgggagtagttcgggtagagtttttttgtttttttattagtttatttcgtcgtttgatcgttttttttttatttttatttttcgttttcggaaaacgcgtcgttttttgggttgggtggagattttcgtttcgcgaaatatcgggtttcgcgtagcgttcgggtttgatatcgtttcggcggttcgttttttttgcgttttcgcgttatcgtcgttcgttcgttcgggtttttgt

SEQ ID NO: 387 - DNA, 2344 bp, Artificial Sequence
  Description of Artificial Sequence: Synthetic polynucleotide
gtaggggttcgggcgggcgggcgacggtggcgcgggggcgtagaggaggcgagtcgtcggagcggtgttaggttcggacgttgcgcggggttcggtgtttcgcgggacgggggtttttatttagtttaggggacgacgcgtttttcgggggcggggggtgggggtggggagggggcggttaggcggcggggtgggttggtggagaggtaggagagttttgttcgggttgtttttatagtttaggcggttgttcgtaaattcgcgcgtgcgtagtaggcggtttatttgttggtatttgggtcggttttgggattttcgggatgtttaggaaagaatggtagtttttcgttgtgtggagttttttatcgggtttaggtttagaaggtaggaattttaggtcggttagttcggtggagggggcggggcggagatacgttttttcgtagttagttaggcgtttttcgcgaaagagaggttatcgttttgtttcgaattattcgatttcgttttaatttcgcgttttaaagtttttttagtagagttcggtattttttttcgttgaggggtgtttttagcgaggcggtttttttcgaggtttttagttttttcggggttttcgtttttaggagaggttgcgtttgttgtagaaatttcgggttcgttaggagtttatttagtagtaggtcgtaggggagtgtagattagggcgtcggtttttggagcgtttgggagggcgtcgggatgttttgtatttgtttttgtcgcgcggaggcgttcgggggcgcgggttggggaggtggagttgtttcggtttggggtttttacgtcgtttcggcgatttggggatttcggttttagttttattacggatttttttgggacgtgggtggcgtaagtattttttggttttgcggtttcgtttgagcgggtttaggttgtgttatcgcgtaggggttcggtaggtcgtcgcgttgcgggtttcggttttttcggtttttgtttcgggtgcggaggttatcgaggagtttgagggtgggagagcgtttcgttcggaggagtcggggcggcgtaggcgaaattttcgcgcgtcggggtaggttgggagattttttttgtcggcgcggtttggttgggttgtagcgcgggggcggttttcgttgtttggtttacgaaagttttttgtgggagagttttaggcgcgtagggtacgtggggtgcgggaagtttcgttttttacgcgtcggtgtgggcgaaggcgatttacgagggagtagggtgattttcgtcgggggtcgcgttgtataggtcgtttgtttgcgcgggcgttttgttattttgtttcggggtttggtttttcgattttgaaattagatttgaattttggatttcgggaggttcgtttttttggttagtttttttcgggcggcgatgtttggaaagcgattttttttaaaggttcggaggagtagggcggtttgggattcggtgacggcggttcgttttcgtcggttttttggcgggtcgcgtttttcgggttagggtcgagattttcgtcggtgttgttttagttggcgtgattttttattttgaaattaaatttggattttgggtttcggaatgtcgatggtttgggttagtcgttttttggtggcgatgttcgggtacgggtttcgtttaaagtaggttcgtagggtttcgttttggttcggggtttaaacgagttttcgtcgtcgttttcgttttcgggttttcgcggggagggtgttgttcgaaggtgtcgggagggttatcgcggtgagtttcggtcgtaattttacggacggacgcgggtagagagaggtcggcgggttttcgtgtattttagtcggattgtgtattgcggtaggtgtagttaggaggtttgttcggatagttagttagttagttagtcgtttttgtaaaggtttacgggtaggtaggttttatttttttatgaatggcggtgagtttttttgggatagttcgttttatttcggaagggatttagggcgtcgaggtttggggtcggtcggcggggtggtggtggtggtggtggtggtggtggtgtggggtggggggggtggtgggggagggcgtggtggcggtggtggtggtggggtcggagagacgaagaggaagggggagaggggggaggggggaggggggcgcgtttcgggggtcggtttttcggatttttttagggatttcgcgggaacgggaagtcgttttttgggtttttacgcgtcggtagtagggagaaattagtttgggagggtggaggggagtgtggaattgaattttcgtgggagttttgagtgtgttaggt

SEQ ID NO: 388 - DNA, 2350 bp, Artificial Sequence
  Description of Artificial Sequence: Synthetic polynucleotide
tagatgtattggtgagattaggttttggttgtgattttgggtttgtattatgattttcgatttttgatttagattataattatgatttggtcgtaattttttgatttggattttagttttttagtttttagagtttgtgatttttgattttgatttggattataatttttgattttgaatgtgatttttgagatttaatttgatagtaatatttgattttaattattatttttgatgatagtttttgtttatattttgatagtaattgtgatttttatgattttggttttgaatgtgatttataatttttgaatttgattgtgatatttgattttaattataattattaattatagtattgattataattttgattgtgtgatttttggttttattttttttatagtttttgtttttttttagaattttttttttggaatttggttgggtttataatttttgattttggtttttgatttgaggtagaattttggattttgattataatttttgattttaattggatttagattttagttattaattttgatttatggtttagtcgaattttatttaatgattttagtttataatatttgattggttttttgttttagttgatttttgatttttgtttgattttttttttgattttaaaattttggtataggtagtttttagaaatttagatttataggatttgtaattatggttttcggaattcgagaattttggttagttttatttatttttgttatagagtttttttttagtttttaatttatgagattttttattattttttttagatattttattttaaggggattggtcgggtgtgtttcgagattggattttttttgaatatttttattttttatagatgtggacgaatgtagttcgggtgtttttttttgtggtttttacggttattgtattaatatcgaaggtttttttcgttgtagttgcgcgttaggttatcgggcgtcgtcgggtcggttcgggttttgcgtaggtgagtagtatagggattcgttagagagtttgggagtagggtttgggttttagggtaaagtcggttggaaaggtggaggcgggattaaggcgttgtgggaggagtttagaaatttggtattggtgggggcggggttattgcgatgtgggcggagtttgtttgggaggtcgggtttcgtgatttcgtttaatttttcgcgtattttagacgtgaacgagtgtttggagggcgatttttgttttttttacggcgagtgttttaatattgacggtttttttgtttgtatttgtgtttttggttatcgattcggatttcgcggagttttttgtttcggttcgtattcgggttgattttggtttcggaaagggtgggtttagggtaggaaaaggcgggacggggagaagagggcgaaaaggggaaaacgagtttttagtcggggtattttagtaggattagggggtagttggtgggagtttcgaggtagtgagggggggcggggcgtggagatgaaagggtcgagtttgggtatttggatcgtgattgtaaagaagttgttttaaattcgtcggggggcggtgtttgtagggagggaagtagcgtgaggtaggttggggaaggcgtgagaggtttaggagagtcgaggggcggtggaggggtgtggtttagaatgttaggcggagcgggaggtgggtcgggttttcggacgttttgtttcgtagacgttgacgagtgtagcgaggaggatttttgttagagcggtatttgtattaatatcgacggttttttcgagtgtatttgtttttcgggatatcgcgttggttcggatttcgttttttgtttcggtgagaggtttcgtttcggtttgatttttttttttttcgatttttcgattcgtcgattggttttttatttttgttttttttttttcgttttttttttttttttatttttttttttcgtttttttttttagtttttttaatttttttttattttaatttttttttgtttttttttttgttttttcggttttttttttttgattttttttttttttttttgtattttttattttgtttttttgttttttatattcgattattcgatttttttttttagacgtggacgaatgtcgcgagcgaggtttagttttgtgcgggtcgtagcgttgtgagaattttttcggtttttatcgttgtgttcgggattgcgattttgggtattacgcgggtttcgagggtatttgtgacggtgagtttgtttttattcgttttcgttagcgtttgtaacgcggtgttggaggttgtttttttggggattgaggaggggcgttttg

SEQ ID NO: 389 - DNA, 2350 bp, Artificial Sequence
  Description of Artificial Sequence: Synthetic polynucleotide
tagggcgtttttttttagtttttaagggagtagtttttagtatcgcgttgtaagcgttagcgaaggcgggtgggggtaggtttatcgttataggtgttttcggggttcgcgtggtatttaggatcgtagtttcggatatagcggtaggagtcgggagagtttttatagcgttgcgattcgtatagggttgggtttcgttcgcgatattcgtttacgtttgaggagagaggtcgggtggtcggatgtgggaagtagggaggtaagatgggggatataaagaggggagaggagagttagaagggggaggtcggggaagtagaggagagggtaggagaagattggggtagaggagagttggggaggttaggagaggaggcgggggaaagaggtaaggggaggggagaagcggaggaggaaagatagaggtgggaggttaatcggcgagtcggggagtcgaagggaggagggattaggtcggggcggggttttttatcgaggtaggaggcgaggttcgggttagcgcggtgtttcggaggatagatgtattcgaaggagtcgtcggtgttggtatagatgtcgttttggtaaaggtttttttcgttgtattcgttaacgtttgcgggatagggcgttcgaaggttcggtttatttttcgtttcgtttaatattttaggttatatttttttatcgtttttcggtttttttaggttttttacgttttttttaatttgttttacgttatttttttttttgtaaatatcgtttttcgacgggtttagaatagtttttttataattacggtttaaatatttagattcggtttttttatttttacgtttcgtttttttttattgtttcgagatttttattagttgttttttgattttgttggaatatttcggttaaaaattcgttttttttttttcgttttttttttttcgtttcgtttttttttgttttaagtttatttttttcggggttaggattagttcgggtacgaatcgaggtaagaggtttcgcggggttcgggtcggtagttaggggtataagtataggtaaaggagtcgttagtgttgaggtattcgtcgtgagggaagtagaaatcgttttttaggtattcgtttacgtttagggtacgcgggagattgggcggagttacgggattcggttttttagataagtttcgtttatatcgtagtaatttcgtttttattaatgttaggtttttaagttttttttatagcgttttggtttcgtttttatttttttagtcggttttgttttggaatttaggttttatttttagattttttggcgggtttttatgttgtttatttgcgtagggttcgggtcgattcgacggcgttcggtagtttggcgcgtagttgtagcggaaggagttttcggtgttagtgtagtggtcgtggggattatagggaggggtattcgaattgtattcgtttatatttgtggggggtgggggtgtttagaaagggtttagtttcgggatatattcgattaatttttttggagtagggtgtttgggggaggtggtgggaagttttatgagttggaggttgggggagggttttatggtagaggtgggtagggttgattaaggttttcgggtttcggggattatggttgtaagttttgtgggtttaggtttttaggaattatttgtgttaggattttggagttaggagagggattagatagggattagaaattaattagggtaagggattagttaagtattataaattaggattattggatgggattcggttgagttatgggttagagttagtgattggaatttgaatttagttaggattagaagttatagttagggtttagaattttgttttaagttaggggttagggttagggattatgaatttaattaggttttagagaagggattttgagaagaggtaggggttgtgaaagagataggattaagagttatatagttaaggttatggttagtgttatggttagtggttatgattagggttaaatgttatagttaaatttaggagttataggttatatttagggttagagttatgagggttataattgttattagggtatgggtagggattattattaagggtgatggttagggttaaatgttattgttaagttgggttttaggagttatatttagggttaagagttgtggtttaggttagggttaggagttataggttttggggattgagggattgaggtttaggttaggaggttacggttaggttatagttgtgatttgggttaagggtcgggggttatgatgtaggtttaaggttatagttagggtttggttttattagtgtatttg

SEQ ID NO: 390 - DNA, 2206 bp, Artificial Sequence
  Description of Artificial Sequence: Synthetic polynucleotide
gggtattttttgggatggtaagtggtattagcgttgtgagatggttttttttttgtcgttaggcgttaggaggtttgttcgggtttgtatgtgtttgggtttggtaggtggggaggcggtatttagggtagttttcgtattggaagttttaggaatttggatttaggttgaaggtttttgttttagagtttcggattgttgagtttggaatagttttttttagatatagtgtggcgcgggagtagttgtatgagggtttacgtattttgtatatattagtagtttattcgattttgtttttggttatgcgaaacgtatgtttattcgattttcgattttgtttttggttatgtaggtttcgtttgggttgtgataggaggttcggcgtttttaggtatttggtaggttttttcgattttttttttgagcgataggaatgggaagtgagtaaatttaagtagaattaggaggttttttttagaggagtttggcggaattcggttttggttgtgtgtcgagtggcggggtatttatagggagatgagttagtgtttattttttgttttagttttttcgtggtcgtttttttttttagaaggggttggtttaggttggtgttttcgtggtttttggagtatatttgttgtcgttttttttggtttttggcgatagtaggtttttcgtattttatttgttttttagttagtatggttttatatagaatacggtcgtagataatttttttgtgttttgtatagcgaattgttattttgcgtgggttttattgttaggttagggaggtaggagttgtttttattttttgttcgggagttgtcgtttgtttttcggatgagttaggaataaatgcgttaatattgggtggtcgttttcgttatttttgcgtacgggttttgtggggagagttaggtagtgggtggcgtgggataggtgatgtttatgtttagtatttaggagatttgtatggtagtttttaagatgggtataagcgattataaggagggatgtacgtgttttatttttttatttattacgggattaggttgaggtcgtttagggagtgtatgggagggttgcgttcggcgtatttgtagagattttttgaagaggggttttggttgttttttattggggtaggtgcgggtttaggttttcgatatcgtgacggtgttgtgggattttgatggattttattcggggagtttaggtttgttttacggtaaggtggttacgtattgtttttgtagttttgagtataggttttatacgggatttgaggtttgggttttatgatatttgggttatgtgtttttttggtgttttttttttggggatgaaattatatttataggtaaaggtttgggagtggagggagatagtaggagataaagtaaggggacgaggattttggtagttataaaggtagcgggagggttttggaggtttttgttgggtagcgtagttaggaaagggtttattaggtgggagaggtaggcgtttggtgagtgttgagatttgtattacgagaagggttgggtttttaaggtatgtatggggtttgggagtggagggagtgtgagcgggtgttaggacggggtttggggcgagcgggtgttaggacgggtttgggagcggagggagtgcgagcgggtgttaggacggggtttgggagtggagggagcgcgagcgggtgttaggacggggtttgggagtggagggagcgagagcgggtgttaggacggggtttgggagtggagggagcgcgagcgggtgttaggacggggtttgggagtggagggagcgcgagcgggtgttaggacggggtttgggagtggagggagcgagagcgggtgttaggacggggtttgggagtggagggagcgcgagcgggtgttaggacggggtttgggagtggagggagcgcgagcgggtgttaggacggggtttgggagtggagggagcgcgagcgggtgttaggacggggtttgggagtggagggagcgcgagcgggtgttaggacgggtttgggagtggagggagcgcgagcgggtgttaggacgggtttgggagtggagggagcgcgagcgggtgttaggacgggtttgggagtggagggagcgcgagcgggtgttaggacggggtttgggagtggagggagcgcgagcgggtgttaggacggggtttggga

SEQ ID NO: 391 - DNA, 2206 bp, Artificial Sequence
  Description of Artificial Sequence: Synthetic polynucleotide
ttttagatttcgttttaatattcgttcgcgttttttttatttttagatttcgttttaatattcgttcgcgttttttttatttttagattcgttttaatattcgttcgcgttttttttatttttagattcgttttaatattcgttcgcgttttttttatttttagattcgttttaatattcgttcgcgttttttttatttttagatttcgttttaatattcgttcgcgttttttttatttttagatttcgttttaatattcgttcgcgttttttttatttttagatttcgttttgatattcgttcgcgttttttttatttttagatttcgttttgatattcgttttcgttttttttatttttagatttcgttttaatattcgttcgcgttttttttatttttagatttcgttttaatattcgttcgcgttttttttatttttagatttcgttttaatattcgttttcgttttttttatttttaggtttcgttttaatattcgttcgcgttttttttatttttagatttcgttttaatattcgttcgtatttttttcgtttttaggttcgttttaatattcgttcgttttagatttcgttttaatattcgtttatattttttttatttttaggttttatgtatgttttgggagtttagtttttttcgtggtgtagattttagtatttattaggcgtttgttttttttatttagtgggtttttttttgattgcgttgtttaataggagtttttagggttttttcgttgtttttgtggttgttagagttttcgtttttttgttttgttttttgttgtttttttttatttttaaatttttatttatgggtgtgattttatttttaggagggaagtattagggaagtatatagtttaagtgttatggagtttaggttttaggtttcgtatggagtttgtgtttaggattgtagaggtagtgcgtggttattttgtcgtggagtaggtttgggtttttcgggtgaggtttattaaagttttatagtatcgttacggtgtcggggatttgggttcgtatttattttagtgggaggtagttagggtttttttttaggggatttttgtagatgcgtcgagcgtagtttttttatgtattttttggacggttttaatttgatttcgtggtgggtggggagatgagatacgtatatttttttttatgatcgtttgtatttattttaggagttgttatgtaggttttttgagtattgggtatgggtattatttgttttacgttatttattgtttggttttttttatagggttcgtgcgtaggagtggcgagggcggttatttagtgttgacgtatttgtttttgatttattcgaaagatagacgatagttttcgggtagggggtgggggtagtttttgtttttttaatttggtagtggggtttacgtagagtggtagttcgttatgtaggatataggagggttgtttgcggtcgtgttttgtgtggagttatgttggttgggggataggtggagtacggaaggtttgttgtcgttagaggttagggaaggcggtagtaggtatgttttaggggttacggaggtattagtttgggttagttttttttgaggaaggaggcgattacggggagattgaggtaagagataggtattggtttatttttttgtgggtgtttcgttattcggtatatagttaggatcgggtttcgttaggtttttttgaggagagttttttaattttatttggatttgtttattttttatttttgtcgtttagggagaaggtcgggaaagtttgttaggtgtttgagggcgtcgagttttttgttatagtttaggcggaatttgtatgattaggaataaggtcggaggtcggatgggtatgcgtttcgtatgattagggataaggtcggatgggttgttgatgtgtgtagagtacgtgggtttttatgtagttgttttcgcgttatattgtgtttaggaggagttgttttaagtttagtaattcggaattttagagtaaaggtttttagtttagatttaagtttttagagtttttaatgcgggggttgttttgggtgtcgtttttttatttgttaagtttaggtatatgtagattcgagtaggttttttgacgtttgacggtaggaaggaaattattttatagcgttggtgttatttgttattttagggaatgttt

SEQ ID NO: 392 - DNA, 2233 bp, Artificial Sequence
  Description of Artificial Sequence: Synthetic polynucleotide
ttgttggacgtggacgtagatagcgggtttttttatattaagtagcgtatcgatcgcgagtttttgtgtcgttataatgttaagtgttagttgtttttcgaggtgttcgttaacgataaggagatttgtatgattaaggtagagatttaggatattaacgataacgcgtttttttttttttcggattagatcgaaatggatatttcggagaacgttgtttcgggtattcgttttttttttattagcgtatatgatttcgacgtcggcgagaatgggtttcgtatttatttgtttacgcgcgacgattacggtttttttggattggacgttaagtttcgcggcgacggtattaagtttttagaattggttatttagaaggttttggatcgcgagtaatagaattattatacgttcgtgttgattgttttggacggtggcgagtttttacgtttcgttatcgtatagattaacgtgaaggtgattgattttaacgataatagttcggttttcgaggcgttattttatttggtggaattgttcgagaacgtttcgttgggtatagtggttatcgatttgaacgttatcgacgtcgatgaaggttttaatggtgaagtgttttatttttttagtagttacgtgtttgatcgcgtgcgggagtttttttttatcgattttaagatcggtttaattcgtgtgaagggtaatttggattatgaggaaaacgggatgttggagattgacgtgtaggttcgagatttggggtttaattttattttagtttattgtaaagttacggttaagtttatcgatcgtaacgataatgcgtcgtttatcggtttcgttttcgtgcgttagggggcgttgagcgaggtcgtttttttcggtatcgttatcgttttggtgcgggttattgatcgggattttggtaagaacggatagttgtagtgtcgggttttaggcggaggagggacgggcggcggcgggggtttgggcgggttcgggggtttcgttttttttaagtttgaggagaattacgataatttttatacggtggtgattgatcgttcgttggatcgcgagatataagacgagtataacgtgattatcgtggcgcgggacgggggtttttttttttttaattttattaagtcgttcgcgattaagattttagacgagaacgataattcgtttcggtttattaaagggttttacgtgttttaggtgtacgagaataatatttcgggagagtatttgggttttgtgttcgtttaggatttcgatttgggttagaacggtatcgtattttattttattttgttttcgtatatcggcgacgtgtttatttatatttatgtgtttgtgaattttacgaacggggttatttacgttttgcgtttttttaatttcgagtagattaaggtttttgagtttaaggtgtttgttaaggattcgggggcgttcgcgtatttggagagtaacgttacggtgagggtgatagtgttagacgtgaatgataacgcgttagtgatcgtgttttttacgttgtagaacgatatcgcggagttgtaggtgtcgcgtaacgttggtttgggttatttggtgagtattgtgcgcgttttagatagcgatttcggcgagagcgggcgttttatttacgagatcgtggacggtaacgacgattatttgtttgagatcgattcgtttagcggcgagattcgtacgttgtattttttttgggaggacgtgacgttcgtggtggagttggtggtgaaggtgatcgattacggtaagtttattttgttcgtagtggttaagtttattattcgttcggtgagcggattttttttcgagggggtattacgggtgaatggcgagtagtattattgggatatgtcgttgtcgtttatcgtgattttgagtattatttttattatttttttagcggttatgattattatcgtcgttaagtgtaagcgcgagaataaggagattcgtatttataattgtcgtatcgtcgagtatagttattcgtagttgggtgggggtaagggtaagaagaagaagattaataaaaatgatattatgttggtgtagagcgaagtggaggagaggaacgttatgaacgttatgaacgtggtgagtagtttttttttggttattttttttatgtatttcgattattagattcgtttgttttttagttcgtttcggtcggaggtgatgtattttaaat

SEQ ID NO: 393 - DNA, 2233 bp, Artificial Sequence
  Description of Artificial Sequence: Synthetic polynucleotide
gtttgagatatattattttcgatcggggcgagttgaggggtaggcgggtttggtagtcgaagtatatgggggaggtggttagggaggggttgtttattacgtttatgacgtttatggcgttttttttttttatttcgttttgtattagtatgatattatttttgttgatttttttttttttgtttttgtttttatttagttgcgggtggttgtattcggcgatgcggtagttgtaagtgcggatttttttgttttcgcgtttgtatttgacggcgatggtgattatggtcgttaggaggatgatggagatagtgtttagagttacgatgagcggtagcgatatgttttagtggtgttgttcgttatttattcgtggtattttttcgggaagggattcgtttatcgagcggatgatgagtttggttattgcggatagggtaggtttgtcgtggtcggttatttttattattagttttattacgggcgttacgtttttttagaaagggtgtagcgtgcggatttcgtcgttggacgggtcgattttaaataggtggtcgtcgttgtcgtttacgatttcgtaggtgagacgttcgttttcgtcgaagtcgttgtttagggcgcgtatagtgtttattagatagtttaggttagcgttgcgcggtatttgtagtttcgcggtgtcgttttgtagcgtggggagtacgattattggcgcgttgttatttacgtttagtattgttatttttatcgtggcgttgttttttaagtgcgcgggcgttttcgagtttttagtaagtattttgaatttaaaagttttggtttgttcgaagttaaaggagcgtagggcgtagatggtttcgttcgtgggatttatagatatataggtgtagatagatacgtcgtcgatgtgcgagggtaggatagagtaggatacggtgtcgttttggtttaggtcgggattttgggcgagtatagagtttaggtattttttcgggatgttgttttcgtgtatttgaagtacgtagagttttttggtgaatcgaggcgggttgtcgttttcgtttagaattttgatcgcgaacgatttggtggagttgaggggaggagagttttcgtttcgcgttacgatggttacgttgtattcgttttgtgtttcgcggtttagcgggcggttagttattatcgtgtagaagttgtcgtagttttttttaagtttgaaggggacggaattttcgggttcgtttaggttttcgtcgtcgttcgtttttttttcgtttaggattcgatattgtagttgttcgtttttgttagagtttcggttagtgattcgtattagggcgatgacggtgtcgggaggggcggtttcgtttagcgttttttggcgtacggagacgaaatcgatggacggcgtattgtcgttgcggtcgatgagtttgatcgtgattttgtagtgggttgggatagggttaggttttaggtttcgggtttgtacgttaatttttagtatttcgttttttttatagtttagattgttttttatacggattaggtcggttttggggtcgatggagaagagttttcgtacgcggttaggtacgtagttgttgaaagagtagagtattttattattgggatttttatcggcgtcggtggcgtttagatcgatgattattgtatttagcggagcgttttcgggtagttttattaagtaggatggcgtttcgaagatcgggttgttgtcgttggagttaattatttttacgttgatttgtacggtggcggaacgtggaggttcgttatcgtttagggtagttagtacgagcgtatggtgattttgttgttcgcggtttagagttttttggatgattagttttgggaatttggtgtcgtcgtcgcgggatttaacgtttagtttaaagaggtcgtgatcgtcgcgcgtgagtaggtaggtgcggagtttattttcgtcggcgtcggggttatgtgcgttggtgagggggaagcgggtgttcggagtagcgtttttcgagatgtttatttcgatttggttcgaggagaaggagggcgcgttgtcgttgatgttttggatttttattttgattatgtagatttttttgtcgttggcgaatatttcgagggatagttggtatttggtattgtggcggtatagggattcgcggtcgatgcgttgtttggtgtagaggagttcgttgtttgcgtttacgtttagtag

SEQ ID NO: 394 - DNA, 2398 bp, Artificial Sequence
  Description of Artificial Sequence: Synthetic polynucleotide
attgtatttttggttttatagttttttattgtcgattttaggtttttttggattttaggtttttttttttaagatgtattttagaggattaaaaatatattttatttgggtttcgtttgtttttgtggaagggtagtttattagaggatataatttcgtgttttaatttgtttttttttttaaaggaaatgtggagaaaaaaaaaaagtagaaattggaaataattaatatttagtttattttattcgatttttaggggaattggtgaggagtttaagatgattttttttttttagagaaagaatttaaagtttagggaaatagcgataggggagtttaagattgtttttgttagtttttttttggttatttttcgttgcgatcgtaggatagtttttattagtaggagaatcgggtaagtgtgtggataagtagagagtgtgttgaataatttgtaacgttttatgaaatacgtattgttatggttttttaaaaggttttgcggaagtcgtttgtttttattaattaagtttttatttatataaaagtagaagtagaagtagttttagaaaatatattaataattttttatttttttgaagattagagtagtagaaaataggtgatttgtattataaaattgtatttatttttttttttttttagattttatattatattagtttatttgtgttacggtgtataaaaaatggaataggcgtttttattgtattgtttttttttaaaaatagattatttatattttaattttgttttttttaaattcgatttttaataggagagttttttattattttagatggagtgaggttgtacgattgggatggaagaaaggaattttttaaatttgggggaatttttgttttttgttttaagattattttatttggggtgtgggggtgggcgcggcggttagggtagtggaacgtagtcgcggttgcgttatttttgtatttttaggcgcgcgggagggatcggcggggacgcgagttgcggattttggcgaattcgggggaggtagatagggggaggcggatatttagtcggtaggcgttttagttttttcgtagtcggcgggttttttttttgatagttttaggaaaggtagattttttttttagttagttaggtaaggtaaagattgttgttgagtttgttgttattgagggcgtatagattttggggagatcgaagtttgttattgcgggattttgtggggtaatttgggtttacggaagttttttgaaagaggggagaagggtttgtattttttttatggaggatttttttttttttagtatttcgtttgatgtatttaattggtagaagtgagattttaataggtagtagagagcgtttacgtggaggaggtttggggcgtcgcggcgttatttttattttttttcgggatcgcgtttatttttaaagttatacgtcgacgaattaatttatgttttaaatttttttttttagtttcgtgagttcgcggcgatattgggtcgtggggtggttgggaacggttttttttttcggaaaaattagagaacggtttggagagttgaaacgagcgttcgcgagtaggttcgtgtagaatcgggttttaggatcgttgagtttcgtagggcgtttttgggggacgttaggtcgtcggtttttttgttttcgttgagatggataacgtttcgttttcggagttttggttcgttaacgtatcgggttcggattcggcgttgagttgttttaacgcgtcgattttggcgtcgttgtcggcgtcgttggcggtggttgtattagttgtttacgcggtgatttgcgtcgtgggtttggcgggtaatttcgtcgtgttgtacgtgttgttgcgggcgtttcgtatgaagatcgttattaatttgtttatttttaatttggttatcgtcgacgagttttttacgttggtgttgtttattaatatcgtcgattttttgttgcggtagtggtttttcggggagtttatgtgtaagtttatcgtggttatcgattagtataatattttttttagtttttatttttttatcgttatgagcgtcgatcgttatttggtggtgttggttattgcggagtcgcgtcgggtggtcggtcgtatttatagcgtcgcgcgcgcggtgagtttggtcgtgtgggggatcgttatattcgtcgtgttgtttttcgtagttttcgttcggttagacgacgagtagggtcggcgttagtgcgtgttagttttttcgtagttcgaggttttttggtggcgcgcgagtcgtttttatacgttcgtgttgggtttcgttattttcgtgtttattatttgtgttttttatattattttgttgtgtcggttgtatgttatgcggttgga

SEQ ID NO: 395 - DNA, 2398 bp, Artificial Sequence
  Description of Artificial Sequence: Synthetic polynucleotide
tttagtcgtatggtatgtagtcggtatagtagggtggtatagaggatatagatggtggatacggggatggcgaagtttagtacgagcgtgtagaggcggttcgcgcgttattagaaggtttcgggttgcggaaagattagtacgtattggcgtcggttttgttcgtcgtttagtcgggcgaagattgcgaagggtagtacgacgagtgtgacgattttttatacggttaggtttatcgcgcgcgcggcgttgtaggtgcggtcggttattcggcgcgatttcgtagtggttaatattattaggtagcggtcggcgtttatgacggtgaggaagtagaggttggagaaggtgttgtattggtcgatagttacgatgagtttgtatatgagtttttcgaagggttattgtcgtagtaggaagtcggcgatgttgatgggtagtattagcgtgaagagttcgtcggcgatggttaggttgaggatgaataggttggtgacggtttttatgcggggcgttcgtagtaatacgtatagtacggcggagttgttcgttagatttacggcgtagattatcgcgtagataattggtatagttatcgttagcggcgtcggtagcggcgttagagtcgacgcgttggagtagtttagcgtcgggttcgggttcgatgcgttggcgggttagggtttcgagaacgaggcgttgtttattttaacgagggtagaggagtcggcgatttggcgttttttaaggacgttttacggagtttagcggttttgaagttcggttttgtacggatttgttcgcggacgttcgttttagttttttaagtcgttttttggttttttcggaggaggggatcgtttttagttattttacggtttaatgtcgtcgcggatttacggggttggaaagaggaatttaaagtataggttagttcgtcgacgtgtaattttagaaataggcgcggtttcgaggaggggtgggggtggcgtcgcggcgttttaaattttttttacgtgagcgttttttgttatttgttgaaattttatttttattagttgaatatattaaacgaaatgttagagagagaagaattttttataggaaaaatgtaaatttttttttttttttttaggaaattttcgtagatttaggttattttatagaatttcgtagtggtaagtttcggtttttttagggtttgtgcgtttttagtaatagtaagtttaatagtagtttttattttatttggttggttggggaaggggtttgttttttttggagttgttaggagaaaagttcgtcggttgcggggaggttgagacgtttgtcggttgggtgttcgtttttttttgtttgtttttttcgagttcgttagagttcgtagttcgcgttttcgtcggtttttttcgcgcgtttggaagtgtagggatggcgtagtcgcgattgcgttttattgttttgatcgtcgcgtttatttttatattttaagtaaaatggttttggaatagagaatagaaatttttttaaatttaagggattttttttttttattttagtcgtgtaattttattttatttgaaataatagaaagtttttttgttaagaatcgaatttaaggaaaataaagttagggtgtaagtgatttatttttaaaggagaataatgtagtggaggcgtttgttttattttttatatatcgtaatataaatgggttaatgtaatgtgaaatttgaaaggaggaaaaagtgagtgtaattttataatgtaaattatttgttttttgttattttggtttttaaggggatagaagattgttagtatgttttttaaaattatttttatttttatttttgtgtaagtaaagatttgattagtaaagataaacggttttcgtaaagttttttagggaattatgataatgcgtattttataaaacgttataagttgtttaatatattttttatttatttatatatttgttcgatttttttgttaatgagagttattttgcgatcgtagcggagagtagttaaggaaggattagtaggggtagttttgaatttttttgtcgttatttttttggattttggattttttttttaggaagggaaaattattttaggttttttattagtttttttaagaatcgaatgaaataaattaaatattggttatttttaatttttgttttttttttttttttatattttttttaggagagagagtaaattaaaatacgagattatattttttagtaaattatttttttataaaagtaggcgaagtttaaataaagtgtatttttggttttttaggatgtattttagagaagggggtttgagatttagagagatttaaagtcggtagtagaagattgtggggttagaaatatagt

SEQ ID NO: 396 - DNA, 2114 bp, Artificial Sequence
  Description of Artificial Sequence: Synthetic polynucleotide
aaagttatagtagaagggaagttgaagtttgaaaatatattatattttgttttttggtttttaaatttttttagttaaaaatttaggtaaaattattatatttaatatagtaattatttgtaaaattttagaatagtaaataaaggatataaagaaatgtatttttattttttttaaatcgaaaataagtaaaatattatagaattagattttgttttattatataggaattgtttggtaaagattttttttttttttttaaaggtgaaattttaggttgttgaatattgaatgggtaaagatttttataatgttgtatttaagtgagtattaatgattttatttattaataacgattattttttgggaataagaatttattaggaagtaatttttaaaattttataaaggatttaattggtttttataatatggttagtagttatatgtaaattttatttggaagattggggtgaaattaaggggttggtgaaggaatttaggaaaattaaaatattaaatttatttttaatagttgataatgttatgttttaagagaagaaaaagagtatattttgttatagtgtgtgagaaatttaatttttgtttttggatgatggtggtatgttattttttttaaagttaggtattagtgtgagtagtgttttagagaggtgaacgtgtagttgtgttagatatttatagttttatttttaaaagatatatgggaaaatagttaaaagtttttttataattgtattaatttgattaataggaaaataagtggaaaatgtagttttattaaagtagagtagaggtttttttttattaaatttttaggagggggaggggagaatatagaatggttagggggtattttttggaagtcgaagagagattaaatgatgatttttatatttttttcgttgtttaagtgttgaaattaatttagattttatttttttttttatgttaattttggatttttcgagtaatttggagtttatgttttaggttttttgaagattagaagtttaagaagatgggaatttttagaataataattaggggaaattgtttatttgaagggttaagggtagggggttgcgtttggtattttattgagatttcgtttattgaaaatattgtttttaacgaaattatttagtattttgttttatttgcgtggttgttttttttatagtggtgtaatttgtgttagttgattgtttttaggattgttgtaaattttttgatgagtagtatttagaaggggttttagtaaaaattatgcgttttaaatttttaaagtttcgtttgggagagaggttgatatttgtatatgaagtttgttttttggaaatagtaggaggacgtaggaggggcgaagtaatttcgggaagacgttttttttttttttttacggatttagtgtagtttttggtataagtaattttgttatcgggcggttttttttaattcgtgtgggggttgatattaatataagtagtcgttttttcgggtgcgagtgggattttaggttcgggatgtggtgggtgcggtgcgggagaggtattcgtcgttttttttattcggatgttagaggtaagttgttcgtgtgaattcgagcgaacgattggaggttggttgttgtaggtttatttttttaggatgtgggttttagggggcgttttgatgtgatttaatttcgatcgtgaaaataattgttaggggttggttggattgttgttggtttttttttttttggtggttttgtttggtttgggtttagtttgggaataaatttgttttatattaatatttttttttatatcgggcgtcgtcgttttaattgcgcgtggggggcgaggcgtttatttcgtataagaatagaggagcgggggagaagagacggtttcgttgtttattgggtaagcggagtttagtttcgttcgggagcgggtaggagagatagggtagtgatttttatttatattagaaaattttttttttcggcgattttgttgttaattcgagtcggttatagatagtttagtgagtttttaattataaggacgagagaaaagtacggtgtttttcgagtttttttcgtt

SEQ ID NO: 397 - DNA, 2114 bp, Artificial Sequence
  Description of Artificial Sequence: Synthetic polynucleotide
ggcggagaggattcgaggggtatcgtgtttttttttcgtttttgtaattaaggatttattggattgtttgtagtcgattcgagttggtagtaaaatcgtcggggggaggggttttttggtgtgagtgggggttattattttgttttttttgttcgttttcgagcggggttgggtttcgtttatttagtgagtagcgaggtcgttttttttttttcgtttttttgtttttgtgcggggtgggcgtttcgttttttacgcgtagttgaggcgacggcgttcgatgtagaaggaagtgttgatataaaataagtttgtttttaaattaaatttaaattaagtaaagttattaggaggggaaaaattaatagtaatttagttagtttttagtaattgtttttacggtcggaattaaattatattaaaacgttttttgaaatttatattttgaaggagtgaatttataatagttaatttttagtcgttcgttcgagtttatacgaataatttgtttttaatattcgagtgaagggggcggcgggtgtttttttcgtatcgtatttattatatttcggatttgggattttattcgtattcgaagaggcggttgtttatgttaatattagtttttatacgaattagaaaagatcgttcggtgatagaattgtttatgttaggaattatattgaattcgtaagggagggggaagaacgttttttcggggttatttcgttttttttgcgtttttttgttgtttttaaaagatagattttatgtgtaaatgttaattttttttttaaacgaagttttagaaatttggggcgtatggtttttattaaagttttttttaagtgttgtttattagaagatttataataattttaaagataattagttaatataagttatattattgtaaggaaaatagttacgtaaatagagtaaggtgttgggtgatttcgttagaaataatgtttttaatggacggggttttagtaaaatattaaacgtagttttttatttttggttttttaagtaaatagttttttttagttattgttttaaaaatttttatttttttgagtttttaatttttaggaaatttggagtataggttttaaattattcggggaatttagagttaatatgaaggagaaagtgggatttgaattagttttagtatttaaatagcgggggggatgtaagagttattatttaattttttttcggtttttagaaagtattttttggttattttgtgttttttttttttttttttgagggtttgatgaaaaggaatttttattttgttttggtgaaattgtattttttatttgtttttttattggttaaattggtgtagttatgggaggatttttgattgtttttttatgtgttttttaagaatggggttataaatgtttgatatagttatacgtttatttttttgggatattatttatattggtgtttaattttaagggaagtgatatattattattatttaaaaataaaaattgggttttttatatattgtagtagaatatattttttttttttttttgaggtatagtattgttagttattaaaaatggatttaatgttttaatttttttggatttttttattaattttttaattttattttaattttttagatagaatttatatgtgattattggttatgttgtagggattaattggattttttgtaaagttttaaaaattgttttttagtaaatttttatttttaagaagtagtcgttattagtaggtgaagttattagtgtttatttagatatagtattgtaaaaatttttatttatttaatgtttagtagtttgaaattttatttttaggaaaaaaagagggatttttgttagataatttttatataatggagtaaaatttgattttgtagtgttttgtttgttttcgatttaagggagatgaagatatatttttttatgttttttgtttattgttttgaagttttatagatggttattgtattggatataataattttgtttagatttttaattgagggggtttgagaattaagggataaaatgtaatgtgtttttaaattttagttttttttttgttgtaatttt

SEQ ID NO: 398 - DNA, 2382 bp, Artificial Sequence
  Description of Artificial Sequence: Synthetic polynucleotide
aggttttggaggtggttattgtcggtttaggtacggtttcgttcgggattattggttgttttcgtggggtgtttcgtttggggtttttttttattttgggacgttttaggcgcgtttagtttgagttggtggagagggcgggggcgggggcggttggggtttcgaagtttaggtttttttttttattttttcgtcggttttgtcgttgcggttttcgttttcgcgttcgttcgttttcgagttttttttttttttttttttttttttttttttttttttgtagtagtaataatttgatttcgttttttttattcgttttttgagatgttttttatattcgtttgtatatagcgcgtgcggttttttcgaaggcgattttcgtaaatcgcgacgtaggtttttcgttttaggtaattttcgttgcgggagaggtcgttttttggcgtttacgttttttttttgtagtttttattgtcggtcgagggggaaatgggcgataggggaaggggaggtgtgtgcgggacggattaggttggggtagaggggtttaaattggcgcggttttatagaagtttgaggagggcggggtcggtttcgagttttcggagttttacgggattttttcgattttattgaggagttttcgttagtttcgtgtatttttgtaatattttttattttattcgttagtttcgagtttatagtttttcgggttcggggattggttgggggaggggacgggggggaggggattttttggttgtagggaacggcgtgcgggcgggggtgggagggaaacgatttgttttaggagatagggatgaaggtttttttgagttaagggagggagaagagaggtggaataaaaggtagatgttggaggggaaggggagttggggagttcgtttcgagggtttcggtagttcgcggttttttgttttagtttgttttagagggtgaggttaaggttggtgttagggttttttatcggttatttggattttacgcgtttagtatttattttttttcgtacgtttattttatgtattttttcgcgttttttttacggtttttttgcggcgagtcgtttttgttttttcgtaggttttcggttttagcgttaaggtatcgcggtttttttcgtttttttttcgcgttgaattcgggtttttcgcggggagaaataggttgggggcgaggggttttcgagataatttaggatattttttcggggtttagttaggtaatttcgacgtttatggattttcggattatagtttttatcgcgggtttagttttatttttagtttatttcgcggtgagcgttaagttttaaaagtcggagtgttatcgtttggtgatttcgcgttcgttcgcgttttttaatttatggttatttgtttgttatagcgaatttttttttaggaaagaatttgttttttgtaaagaggatgtgtaatgttggaaagttcgtttttttttttattagttggattttgagagttgggagagatgattaatgaataggttgagggtgttatagttttgttattttgggatggggggtgtagtaggggagttatagtttttttagaggttaggttattttatttagttgtattttatttttaattttttagtgggcgatatttgtagggtgttgggattgggagaaattttagatattttaaattttaaattttattttttagatgaagatattgaggtttagagtgggttagtgagttgtttaaggttataggataggttagaatggaagtttttcgatttttttcggggcgttgggtttatagttttattttgttattttttgtttcggaagtgagtattgaagttatttaagagaggttagtgattaaaggtagcgatttttaggtgtagaggttggggtagacgtgtttatgagtttgttttttcgcgtatttttttttatttcgtttttatttttgttttggttattatgtgtttttattattttgagatttagagaggtgtagcggtttgtcgaaggttatatagtatattgagtagggttttcgtttttattgtttagttgtttttttttattgtttattcgggtttttgtaagtttgttaggattttcgggagtttgttttttttaatgtatagagtcgtggcgcgtgttaaagtgtgggaaagtttttgggagagggaaggggtagaaaatatagtcgtttattttaattttggacggttgcggtaaggtaggggcgtttagaaaggtagttagttttgcgtatcgtcggtgttttcggtatattttattttgcgttaggggttttttagggtcgcgcgagtatgtttttttagtttttttttagcgaagtaggcgcggcgggg

SEQ ID NO: 399 - DNA, 2382 bp, Artificial Sequence
  Description of Artificial Sequence: Synthetic polynucleotide
tttcgtcgcgtttgtttcgttgaggaggagttggaagaatatgttcgcgcgattttggggagtttttggcgtagagtggggtgtgtcggaggtatcggcggtgcgtaggattggttgtttttttgagcgtttttgttttgtcgtagtcgtttaaggttgagatgagcggttgtattttttatttttttttttttttaggaatttttttatattttgatacgcgttacggttttgtgtattggaggaagtaggttttcggggattttggtaagtttgtagaggttcgggtgggtaatgggagggggtagttgggtagtggaaacgagggttttatttagtgtgttgtgtgattttcgataagtcgttgtatttttttgaattttaggatgatggaggtatatggtaattaagataggaatggggacgaggtgggggagggtgcgcgggggaataagtttatgggtacgtttgttttagtttttgtatttgggaatcgttgtttttggttattggttttttttaagtgattttagtgtttattttcggggtagggggtggtaaggtggagttgtgaatttagcgtttcggggagagtcggaaagtttttattttgatttgttttatgattttgggtaatttattgatttattttgggttttagtatttttatttggaaaatggggtttggaatttaaggtatttgaggttttttttagttttaatattttgtaggtgtcgtttattgaaaggttggggatggggtgtagttgggtagaatgatttggtttttgggaagattgtagtttttttattgtattttttattttaaagtagtagggttgtgatatttttagtttgtttattggttattttttttaatttttagaatttagttgatggggagaaaggcgggttttttagtattatatattttttttgtagagggtagatttttttttagggaaaggttcgttgtgatagatagatgattataggttaagaggcgcgggcggacgcggggttattaaacggtgatatttcgatttttggggtttggcgtttatcgcgggataaattaagagtaggattgagttcgcggtgggaattgtaattcggaaatttatgggcgtcggaattatttggttagatttcggggaggtgttttgaattatttcgggaatttttcgtttttaatttattttttttcgcggagagttcgggtttaacgcggagagaaggcgagagaagtcgcggtgttttagcgttgggatcggggatttgcggggaagtaaaggcgattcgtcgtagagaagtcgtgggaagggcgcggggaggtgtatgaagtgggcgtgcggagagaagtgggtgttgggcgcgtgggatttaggtggtcggtgaagagttttggtattagttttgattttattttttgggatagattgaggtaggggatcgcgggttgtcggagttttcggggcgagttttttagtttttttttttttttagtatttgttttttgttttatttttttttttttttttttgatttaggaaaatttttatttttattttttgaagtaaatcgttttttttttattttcgttcgtacgtcgttttttatagttagggggttttttttttttcgtttttttttttagttaattttcggattcgagaggttgtaaattcggagttggcgggtggggtggggagtgttgtaggagtgtacggagttggcggggattttttagtagaatcgggggagtttcgtagggtttcgggggttcggagtcggtttcgttttttttaaatttttgtaggatcgcgttagtttaaatttttttgttttagtttagttcgtttcgtatatattttttttttttttgtcgtttatttttttttcggtcggtagtaaggattgtagaaggggggcgtgggcgttaggaggcggtttttttcgtagcggggattgtttggggcggaggatttgcgtcgcggtttgcggggatcgttttcggaggggtcgtacgcgttgtgtgtaggcggatgtgaggagtattttaagaggcgggtgggggaagcgggattaggttgttattattgtagagagagagagaggaagagaagagagagagggagagattcgagagcgagcgagcgcgggagcgagggtcgtagcggtagggtcggcggggaagtgggaagagggatttggatttcgggattttagtcgttttcgttttcgttttttttattagtttaggttgaacgcgtttggaacgttttagggtaagagggaattttaggcggggtattttacgagggtagttagtagtttcgagcgaagtcgtgtttggatcgatagtggttatttttagggttt

SEQ ID NO: 400 - DNA, 2192 bp, Artificial Sequence
  Description of Artificial Sequence: Synthetic polynucleotide
ttatataatttttaaaaagaaagaaatttttaaattatagatgtgtttggaattagaatttagaaagtatttgggtagggaaaatagtttttagtgtttaaggttaaagttagtagggtttttttggatgggaaagagatatgagattgtaagtaatttttggatattatttatttgttattgtgtttttatttttttttttagttatttatacgttttttttttttagttaaaatgaatttaatttttgttatagtattttattttgttaataaaatttaggattgaagaatgagaataaaagggttttatatttattattttttaatttttgattttagtttggatagaataattatttattttagaaaattggtatagggagtatttattagtagttgtaatatattattgttaaagggagggattttgtaaggcggtattgggtgttttatatgtatgggaaattcgaggttacgtttagtgttaattataagtatttttatttttggttaggtaagttttgatttttgaattttgagtttttaattttttttaaaatgagaaagagatggttttttttagagttttttagtttttaatttataggtaaatattatcgtatgttgttttttagtagagattggttttaattaaggtaaataagttaggatggattttgttgatcgtgatggtttagtgttatattttatatattttattattttttagaatatttaatagtgttgtttttggtagttttggggttgtagtttttgtagagaggaggaattggtattgaaagaaatagttgagttttattacgttacgtggggcgtttttattgttaagagtaattttttttttttgggaagaaaagcgtgggcggggtcggggtagtttttttttttcgcgttgttttggagattatgggcgtttagttgtagttgtcgttggatcggttttggttgttttgagaggtgttttttgtaggcggggacgcggttaggtcggacgtaaggtttttttttaatttatcgggtttagggggacggttaggggttgtttagtttatttggcgggttagggagggggatggtagaggttggttgggtttttttagtatatagtaggcgtttaattagcgtgatttgaattaggttattttttttttttaatttttttttttgtgttttatggagggtggattagggtttcggatgcgaattttgcgtcgtattagagttttagttttaatcgatattttgagcgtcgttaattttttttcgaagagtatggtagagtgaagtataagtaataattttgtattattcgcgtttttagagttttttcggatttgcgttatgcgcggcggggagaatcggttttttgttcgagtttagagtttatttgaggttagttttatcgtttcgttgaaagttaaaattttaagtcgacgttttttagtcgtttattttttagtagagagttttttttcggggagttttgttttggggtgtcgtttcgaggttagacgtcgtttcgtttggatttgaatttgagtttgggacgggcgattttttaattttaggaattggaattgagatattaaagtttagacgcgttttttggacgacggtttttcggtaggggtatttagttagcggttaagatgtcgttagtggggaaggtgatttaggtttcgaatgggaaagtttattagtagattttttaggttgaggtaggagtcgttttttgtttcgtttttttttatttttttttttttgtttttttttaaattttttttttttttagggtttttttattggaaattgaataaaataagggttttgaaattattttgattttaaaaataatttttgtttgtttttaaatcgtattaatataaaattagaatgttagtttttgaaaattagaaaatttaaattaaaattttaaatgtaaattatttagaaatagtttggatggaattattgggtgatttttgttttttttatgtataaaaatatgattaatttttgtatttaaaaaataggttttattttgtattagtgttttgaaatttgttttttttttataatagtattttatagatttttttttatgttcgtgggcgtttatgtattttattatattgagtagttttttatttgttgatttaggatttttat

SEQ ID NO: 401 - DNA, 2192 bp, Artificial Sequence
  Description of Artificial Sequence: Synthetic polynucleotide
atgggagttttaggttaataagtggggagttgtttagtatggtgaaatatatgggcgtttacgggtatagaaaagggtttgtgagatattgttatgaagaaaaagtagattttaaaatattagtatagaatgaaatttattttttaaatataaaaattagttatgtttttatgtatgggaaaaatagaggttatttagtggttttatttaggttatttttgagtaatttatatttaaaattttaatttaagttttttaatttttaagaattgatattttaattttgtattggtacgatttaagaataagtaagaattatttttaaaattaaagtaattttaaagtttttgttttatttaatttttagtagggaagttttgggagggagggaagtttggaagaaagtaagggaagggggatggagaaaagcgggatagagggcggtttttattttagtttggaagatttgttggtaggtttttttattcggaatttgggttattttttttattgacgatattttggtcgttggttggatgtttttgtcgggaagtcgtcgtttaggaaacgcgtttaggttttggtgttttaattttaatttttgaggttgggaaatcgttcgttttaaatttaggtttaggtttaggcgggacgacgtttggtttcgaggcggtattttagggtaggatttttcggggaaggattttttgttggggggtaggcggttggggaacgtcgatttagggttttaatttttaacgaaacgatgaaattaattttagatgagttttgaattcgagtaggaggtcggtttttttcgtcgcgtatggcgtaaattcgaagggattttgggaacgcgaataatataggattattgtttgtgttttattttgttatgtttttcggggaaaagttaacggcgtttaaggtgtcggttgggattggaattttaatgcggcgtagaattcgtattcgggattttaatttattttttatgggatatagggaggagaattggagggagagagtaatttgatttaggttacgttaattaggcgtttattgtgtgttgagaagatttaattagtttttgttatttttttttttagttcgttaagtagattgagtagtttttggtcgtttttttgagttcggtagattggagggaggttttgcgttcggtttggtcgcgttttcgtttgtagaaagtattttttaaggtagttagggtcggtttagcgataattgtagttggacgtttatggtttttaaggtaacgcggaggggagggattgtttcggtttcgtttacgtttttttttttagggaggggagattgtttttagtaatgggagcgttttacgtggcgtagtgaaatttaattattttttttaatgttagttttttttttttataaggattataattttagggttgttaggagtagtattattaaatgttttgaaaggtggtaggatatatgagatgtagtattgagttattacggttaataaagtttattttaatttatttgttttggttaaaattaatttttgttgggggatagtatacggtagtgtttgtttgtaagttagaagttgaaagattttggaagaaattattttttttttattttaaaagaggttgagagtttaaaatttagggattaaggtttgtttggttagagatgaaaatgtttgtggttggtattgaacgtggtttcgggttttttatatatatgagatatttagtgtcgttttatagaatttttttttttggtagtgatatgttataattgttaataaatgttttttatgttaattttttagaatgagtgattgttttgtttagattagaattagaaattaagaaatggtgagtataaaatttttttatttttattttttagttttgggttttattaataaggtgaagtattgtaataaagattagatttattttagttggaaaaagaaaacgtgtaggtgattgagggaagggatgaaaatataataataaataggtaatgtttaggaattatttgtagttttatattttttttttatttaaggaggttttattggttttggttttgaatattagaaattattttttttatttagatgttttttgggttttggttttaggtatatttgtaatttaggggtttttttttttttaaaaattatatgg

SEQ ID NO: 402 - DNA, 2192 bp, Artificial Sequence; identical to SEQ ID NO: 400
  Description of Artificial Sequence: Synthetic polynucleotide

SEQ ID NO: 403 - DNA, 2192 bp, Artificial Sequence; identical to SEQ ID NO: 401
  Description of Artificial Sequence: Synthetic polynucleotide

SEQ ID NO: 404 - DNA, 2244 bp, Artificial Sequence
  Description of Artificial Sequence: Synthetic polynucleotide
  modified_base (2126)..(2126): a, c, t, g, unknown or other
  modified_base (2128)..(2128): a, c, t, g, unknown or other
  modified_base (2131)..(2132): a, c, t, g, unknown or other
ttttattttttttttttttttcgttttttttttatttttttttttttttttttttttttttttttattttttttttgtttttgagtttttattgatcgatttttttttattttattcgttttttttttaatgtgttaatttttgttttattttcgatttttttaggtattgggaggcgggatgggggtgtgcgtttttttttaggagttttgtttttttaagatttatagaaattaggatttgtttttatttaaaattttatgtattttaagttttttttagataatatattttaatttttcgggttgattagtttttttgtgtagaggtagttgagaggttttgttttgtagagggaaaagagttttttatttttttatttattatataggtaaatttatttggttattggttgaaggtatagttttgttttcgcggggaatcggcggttaggatataatagcgtttttggagtttatttttggttttggcgttggcgtagggattttttgatcgggtttgaggggttcgggttagttttaatgttattatttatagcgagggtagggtgtaaggttgagaaggttatatttatcgttttgggaggacgtgggagaagagattgaggtggaaagcgttttgttttgtttatcggtcgtttttgtttcggttttagcgtttgttgggatttgttaggatttgtcggggtttcgggagattttgagtattcgtaggaagaggtgttgagaaattaaaaatttaggttagttaatgtatttttgtcgtcggttgtaggtttcgtttttgtattaagcgggcgttgattgtgcgcgtttggcgatcgcggggaggattggcggttcgcgggaggggacgggtagaggcgcgggttatattgttttggagtcggttcggttttttgtgttttttttagcggttaagttgcgaggtatagttttttattgttttaggagtatagaaattttttgtgtgggcggcgggtgcgcgagttagagggaaagatgtagtagttattgcgattggtacgtagttgcgcgtttttgtgcgtacggatttcgcgcggtgtgcgtggcgattgcgttgtttttaggagtaagttacgggtttagaggggtaaaatgtttaggtttttcgttgggaaggatatattatattttatggtaagttagggtgggcgattttttatggatcgggtggaggggggtattttttaggatcggcgggcggtttaggggaataattcgtggtggcgatgatttgtatagcgcgggttttgggatgcgcgcggtttcgagttagtttcgtatagttcgttttcggagttgcgagtttaggtttttattttcgatttttcgggtttttttcgtatcgttgagtttagtttgtggggtgtattcgattaacgttcgatagggttggggaatgtgataggtagtaggtttattcgggtttggggagggggagttttcgttttgatagtatttttttttgtcgtttgttggtggatttttatttttagtcggtaatcgtttcgtagtgttgatttaagaaggtaaagaaaattaggtttttttgtaaagagttttttttaaatcggcggatttcggatattttgagtggatttagaaatttatgtaattttttttttttagtttattttttatttttttttatagttttttttgatttgttgttggttcggggtaagataaagtagttagtagagagcgataataatagcggcgggaaatgaattggagattggttgatagtttttaatattttgttatagattttttcgaatgttttaggttgtttttggtgggttttagtattcgtcggttttttgggtatcggggattagaaggaatttggtagttggttttaggggtatagttaaaggtaggatgatagttatttttttgtttattttagagcgttgtcgtttttttatgtcggtcgcgtaaagaatatagtttttaaaaaatacgtgttttttgtttatataggtttgaaagtgatgaggaaagtaatgtttcgtttattagcgagttttagtttttaaaatgattttaagcgttgttgagatgagaaagcgtggtatntnttnngggggtttttagttttattcgcgtttatggtgtaagtttgtagggataggttcgggatagtattgtttacgttgttagatttttcgtagaggatcgttgaagttgttttcgt

SEQ ID NO: 405 - DNA, 2244 bp, Artificial Sequence
  Description of Artificial Sequence: Synthetic polynucleotide
  modified_base (113)..(114): a, c, t, g, unknown or other
  modified_base (117)..(117): a, c, t, g, unknown or other
  modified_base (119)..(119): a, c, t, g, unknown or other
acgaaggtagttttagcgattttttgcggaaaatttagtagcgtgggtagtgttgtttcgggtttgtttttgtagatttgtattatgggcgcgggtggggttgaggatttttnnggngnatgttacgtttttttattttagtaacgtttgggattattttaaaagttgaaattcgttaataggcgaagtattattttttttattatttttagatttatatgggtagaaggtacgtgttttttaaaagttgtgttttttgcgcgatcggtatgagggggcggtagcgttttgagatgagtaggagaatagttgttattttgtttttaattgtatttttaagattagttgttaagttttttttggttttcggtgtttaagaagtcggcgggtattaaaatttattagagatagtttgggatattcggggggatttatgataaaatgttaagaattgttagttagtttttagtttatttttcgtcgttattattatcgttttttattggttgttttattttgtttcgaattaatagtaaattagagaaaattgtaggagaggatgaaaaataaattaaaggagaaagattatataaatttttaaatttatttaaagtattcggagttcgtcgatttgggggaggttttttgtagggaaatttagttttttttatttttttagattaatattgcggggcgattatcgattgggaataggaatttattagtagacggtaaaggaaaatgttgttaaagcggaaattttttttttttaagttcgggtgaatttgttgtttgttatattttttagttttgtcgggcgttggtcgagtgtattttataagttgggtttagcggtgcgaggaaagttcgggggatcgggggtggaaatttgagttcgtagtttcggaagcgagttgtgcgaggttggttcggaatcgcgcgtattttaagattcgcgttatgtaaattatcgttattacgaattgtttttttagatcgttcgtcgattttgaaagatatttttttttattcgatttatgggaagtcgtttattttggtttgttatagggtatagtgtgttttttttagcgggggatttggatattttgtttttttgggttcgtggtttgtttttaggggtagcgtagtcgttacgtatatcgcgcggggttcgtgcgtataaaagcgcgtaattgcgtgttagtcgtagtaattattgtatttttttttttagttcgcgtattcgtcgtttatataggaggtttttgtgtttttagaataatagagggttgtatttcgtagtttggtcgttagaggaggtataaagagtcgagtcggttttagaataatgtaattcgcgtttttattcgttttttttcgcgggtcgttagtttttttcgcggtcgttaggcgcgtataattagcgttcgtttaatgtaaaggcggagtttgtagtcggcggtagggatgtattaattaatttgaatttttaattttttagtatttttttttgcgagtgtttagggtttttcggagtttcggtaaattttggtaaattttagtaaacgttgggatcggggtaaggacggtcggtgagtaaggtaaagcgttttttattttagtttttttttttacgtttttttaaagcggtgaatgtgatttttttaattttatattttgttttcgttgtaggtagtgatattggagttggttcgagttttttaagttcggttagaaagtttttgcgttaacgttaaggttagagatgggttttaggagcgttgttgtattttggtcgtcggtttttcgcgggggtaaggttgtgtttttagttaatgattaaataagtttgtttatatggtgggtgggagagtagagagtttttttttttttgtagagtaaagttttttaattgtttttgtatagggagattagttagttcggaaaattgaaatgtgttgtttaaaagagatttgaagtgtatggggttttgaataagggtaggttttggtttttgtgggttttggaaagatagggtttttagaggaaaacgtatatttttatttcgttttttagtatttgggaagatcggaaatagggtaaaggttggtatattgaggggagggcgaatgaaatgggggggggtcggttaatgaaagtttagggataaggagagagtaagaaagaaaaagaaaagggagaagggaaagtaggggaagagcggaagagaaagagaaaatggaa

SEQ ID NO: 406 - DNA, 2420 bp, Artificial Sequence
  Description of Artificial Sequence: Synthetic polynucleotide
ttttttttttcgggatgagtagggagagcgcgcggaggttttcgattttttcgattataattaagaaagaataatttttaaagtgtttaatattttcgtttttaagttttttaaaatataggggtagggaatattaaaatattcggtttttattaggaagattacggttttgaaaggaaatagtagatacgatattttattttatttggatttatgattaaaaaaataaaaataaaaatttaaagagttcgtttgtattttttttttttaaatttcggttcggttcgaaggtagggaatttaaaagatcgaggtcgatggaagagagttagcggggcgagcgagcgggtagtttttttttttgtttttcggagttatttagaaggataggggaagggaaggaagaagaggcgaggaaaaagaggagggagggaagcggaggttaggagcgacggagtaaggaaagtagtttgtaagcgagaaaagagggaaaaaatatagtcgtacgaatttagagagattataagtcgtacgtaagtagtagtagaaagagcgagagcgcgagcgcgcgtttttttcgcggtttggggttagatagtttttagattagttcgaattattttttaagtattgtttcgttttttttgtttcggtcgttttttaatttttttttttttttttttttattttttttttaaaaattaaaataatataagggagggtggtaaaagtttttttaaatcggtcgatttatttaaagataataataataataataaatatataataatttatattttatggtgggagagacgtgggattaattttcggtatttattttaatatttgatagttagaataaataaatatatatatttatattaatagatatatatagaaaatttggagttaaagtatttggtaagagcggaaaaaaaaagaattaaaaggtaaaataatgattatgagtagcggcggcggtagcggtattagcggtaatagcggcggcggcggtagtagtagtagtagcggcggtagtaatagtaataattatttggtgttcggttttttttagaaattttttgtattattatttttaagaattttagttttaagaattaatagagtttaattttcggaatttgagtttcggattttattattgttacgtggtaggggaggatttggtgttagtttttcgagatttttattgtttttggttaattaaaagtttttaaagttataagatttttttattggtcggtatatttcgaggtttttataagtagagcgtttcggatttggaggtttcggttcgaggttcgaggggtttgaaggtggtttttttttttcgggtttaagacgatggtatggtttgtttcgttattattacgtgggttttttttttgtgacgtcggcgttttcgttgtagtaaagttcggtttttggaattttgagaattaatttgttattcggtgatataagagggggagtgcgttttgttttttcggggtttggggttaatttttttttttttatttataaatttagtagatcgagttaaatgtataaaagggagcgagaggtttgaattattgggaaaagtatgttatatatatagtagggttagagaggcgagtaagagaaaaataaaataaaataaatattatagttttttttaattagaatattaggtattacgagaaaaatatttgttaagtagttttcggtgggtttatttgttttatttttatttaggataggggtttttgttgttgttttgggtttttttttttttggtgtggtggtttgggatttttggtttttgtattttgatggtttatggatttttgtttttgattttttgttttttgtaagtttgtggtgttacgtaaattataggatcggtatcggttggatttttttgtacgtgttttttttttttttatttaattttttaagcgttttaaagatgtattattttaatattaatattattgaaagaagtttaaatttttggttatatgtaataattttagtttttatttttttttttttttttttttttggtgtaatttttttttttttttttggatttttgttgaagtgtgttttttttgtattttagagaaatgtttaaaggatttgttttggtttggtttgtttttttttaggatagtaagtggtgggtttaatttgttattgttgatttttgggaaattttttgttgtaagaaacgtgtgtgtgggggggagggtgggggtggcggggtggtatgtgtgtgttttttataaaattttgtgagttaaatatttgtttgtgttttgtttttttttaaggttttgagatttttgttttcgaggttcgttttaaggtcgttgtaaaaaaatttttttagtttgtgtttaagagattagtcgg

SEQ ID NO: 407 - DNA, 2420 bp, Artificial Sequence
  Description of Artificial Sequence: Synthetic polynucleotide
tcggttgattttttaaatatagattgaagagatttttttataacgattttgaaacgagtttcgaaaataaaaattttaagattttaagagaaaataaaatataaataggtatttggtttatagaattttgtagaaaatatatatatattatttcgttatttttatttttttttttatatatacgttttttgtaataagaaattttttaagagttaataataatagattaaatttattatttgttgttttggaaagaaataaattaaattaaaataaattttttgaatatttttttgaagtgtaggagagatatattttagtaaaagtttaagggggaaaaagaaaattgtattaaaggaaaaaaaaaaaaaaaaagtgggggttgggattgttatatatggttaaaaatttaagttttttttaatagtattagtattgaaataatatatttttaaaacgtttgagggattagatagggaaagaaaaggtacgtataaaaaaatttaatcgatgtcgattttgtgatttacgtaatattataaatttgtaaaaggtaaaaaattagaagtaaaaatttataaattattaaaatatagaaattaaaaattttaagttattatattagaaagaaaaaaatttagaataatagtaaaaatttttgttttaaataaaaataaagtaaatgaatttatcgaaaattgtttggtaaatatttttttcgtggtgtttaatattttagttggaaagagttgtgatgtttattttattttattttttttttattcgtttttttaattttattatatatataatatattttttttagtggtttaaatttttcgtttttttttgtgtatttagttcgatttgttgagtttatgggtaagaaagaaggaattagttttagatttcgggaaagtaaagcgtatttttttttttatgttatcgaatagtaaattagtttttagaattttagaggtcgagttttgttatagcgaaggcgtcgacgttatagaggaggagtttacgtgatggtggcggagtaggttatattatcgttttgggttcggggagggagagttatttttaggtttttcgagtttcgaatcggaatttttaaattcgagacgttttgtttatgaggatttcgaaatatgtcggttagtgaaaaaattttgtggttttgagggtttttggttggttaggggtagtaaaaatttcggagagttgatattaagtttttttttgttacgtagtagtggtaaagttcgaagtttaaatttcgagaattgagttttgttgatttttagaattggggtttttagaagtggtgatgtaagaagtttttaggaaaggtcggatattaggtgattattgttgttgttgtcgtcgttgttgttgttattgtcgtcgtcgtcgttgttgtcgttggtgtcgttgtcgtcgtcgttgtttatgattattattttattttttaatttttttttttttcgtttttgttaaatgttttggttttaagttttttatgtgtatttattgatataaatgtatatatttatttattttagttgttaggtgttaaaataaatgtcgaagattagttttacgttttttttattataggatatagattgttatgtatttattattattattgttgtttttgagtgaatcggtcggtttggggaggtttttgttatttttttttgtgttgttttggtttttggaaaggaggtggaggagaggaaggaggggaattagggggcggtcggagtagagaggacgagatagtgtttggggggtgattcgggttagtttgggggttgtttggttttagatcgcggagaggacgcgcgttcgcgttttcgttttttttgttgttgtttgcgtacggtttgtgatttttttggattcgtgcggttgtgtttttttttttttttttcgtttgtaaattgttttttttgtttcgtcgtttttggttttcgtttttttttttttttttttttttcgtttttttttttttttttttttttgtttttttgggtaatttcgggaggtaaaaagggaggttgttcgttcgttcgtttcgttggtttttttttatcggtttcggttttttagattttttgttttcgagtcgaatcgagatttggaaggaaaaaatgtaagcgaattttttgggtttttgtttttgtttttttggttataaatttagatgagatgaagtatcgtgtttattatttttttttagagtcgtgatttttttaatgagagtcgagtgttttggtgttttttgtttttgtgttttggggagtttgggggcggggatgttgaatattttgaaaattatttttttttggttgtagtcgagggagtcgggaattttcgcgcgttttttttgtttatttcgaggagagaga

SEQ ID NO: 408 - DNA, 2344 bp, Artificial Sequence; identical to SEQ ID NO: 386
  Description of Artificial Sequence: Synthetic polynucleotide

SEQ ID NO: 409 - DNA, 2344 bp, Artificial Sequence; identical to SEQ ID NO: 387
  Description of Artificial Sequence: Synthetic polynucleotide

SEQ ID NO: 410 - DNA, 2366 bp, Artificial Sequence
  Description of Artificial Sequence: Synthetic polynucleotide
tttttttttttttttggtagaattgttcgatggttttgattatgtttaggtttatttcgatgtagtagtaggtatggtcggttcggggttcgggatagttcgttacgtagtagtaatagttttttagggtgttgatttttttatatttggtttttttatataggcggtcgaagcgatcgaatagatcgtttaggagatttattagggcgtgggtagatttgttggtatttattttggtgaagtttacgatatttgtaaataaaatattgattttttcgatttgttgtattttaaaagggcggaaggttataggagttttttggatggaagattttttttttttgtttttggggttcgaggtggtatgttttttgatagaatttttattttttttatttttttgttttattaagttatcggttatgatttttggtattacggaatgaattattttttttttgagggttttttttatttttaggtttttttcgtgtataatggattgttttattttgaggaaggtgtttttggattttatttgggatatgacgaataggtggatttcgatggcgtggatgtagtcgtggagtagttttttgtttagtagtttttagtgtagggtttcggtttcgggcgaggggaagtaggttttatttcggaaatggtagttaaaggtttcgaaaaggatagagtaggttatttttagatataaatttaggtataaaggtaagtgtatgacggtatagagtaaaaagagtatttcgatgtatatggagaagttttttatttgagataagtaagtatttgtgggtcgggttgtggtcgtaaggttggagttgtcgtcgcgttttgagataggcgttaagatttggaattgcgtagttagggttagggcgaatattagtagggtgagagttagcgaggtttacgcgtaatgtcgggcgtatagtttggtgaaggtaaatagaaagaagtttatatatattaggaggaagtatagcgcgggggcgattatgacgattagtttggattttatgtggatcgtaaaatagatgttttatagaaggtaggcgaagtcgatgtagaagagcgtatatcggaatcggcgttgggtttgcgggaagtagcgttttaggtaggttttttttaggtttatcgagtcgaatttggggttttattagcggttggaggttttttcgaatagttggggtagttttttttgtttgcgtagtcggttttcgtcgtttattcgtcgggggacgttttcggagtttttagagttgttgtagttagaggagatgttgtatttgtagtgtttggggtggttgttggaggatagttgtttggggttgattttgacgcgtacgttgttgttgttttcgttggagtcgtagtttatttcggtgttgtggtgatgtagtagttgttggtggggtggggaagttatgttgtcgagtttcggggtttgtttcggtcggggttattagtatttgttagtaaaacggggagagttagcggcgtttttatttaggtatgtacgtttagaggttcgggatttgtttttgttttaaggggcggttttagtacgcgatttggataggtattatttgtttttgtggttttcggtttagcggtgtttttatcgtttttatcgtttttattttcgaggcgtacgagaatcgttcgggacggatttagaacgttcgggggttttcgtcgcgtggtcgtcgtggtttcgggatcgttttgttcgttcgtttttcgcgtttttcgtttcgagggtggttttcgcgtcgcgcggtttttttttttcgcgcgttcgttttttttagttgcggtttcggagggaagtttagattttgagcgtttttagtttcgcgagtcgtttgcgtataaataatttcgttggcggcgcggagttttttattttgtaggagtcgcgtttcgatgcgttaaaggcggcgcgcggtcggtttcgggttcggatttcgattcggagtagcgagtttcggcgggcgttttcggttcgcgtttttcggtcgtttttcgcgtttcgggtcggttttgttcgcggcggcgggcgttgggggtgggggcgtttcgggttgcgagtgcgcggagttcgtcggcgcggttcgtttagtggggtttgttttttttcgagtgcgtcgtcgttttcgtcgcggtcgtagttgtttcgggatcgagcgcgtggaattacggacgcgggtttttcgtcgggcggcggtgtagacgttgtcgtagagtcgggttttcgcgacgtcggtcgggacgttcgttcgttcgcgtttacgtcgggggtcgttttttcgagttagagatgcggtcgtcgtcgcgttcgtcgt

SEQ ID NO: 411 - DNA, 2366 bp, Artificial Sequence
  Description of Artificial Sequence: Synthetic polynucleotide
gcggcgggcgcggcggcggtcgtatttttagttcggggaggcggttttcggcgtgggcgcgggcgggcgggcgtttcggtcggcgtcgcgggagttcggttttgcggtagcgtttgtatcgtcgttcggcgaggggttcgcgttcgtggttttacgcgttcggtttcgggatagttgcggtcgcggcgggagcggcggcgtattcggggggaagtaggttttattagacgggtcgcgtcgacgggtttcgcgtattcgtagttcggggcgtttttatttttagcgttcgtcgtcgcgggtagggtcggttcggagcgcggggggcggtcggggagcgcgagtcgggggcgttcgtcgaagttcgttgtttcgggtcggggttcgggttcggggtcggtcgcgcgtcgtttttgacgtatcggagcgcggtttttgtaggatggagggtttcgcgtcgttagcggagttgtttgtgcgtaggcggttcgcggggttgggagcgtttaaggtttgaattttttttcggagtcgtagttggaggaggcgagcgcgcgaggaggagaagtcgcgcggcgcggaggttattttcggggcgagaggcgcggaaggcgagcgagtaaagcggtttcggagttacggcggttacgcggcggggattttcgggcgttttaggttcgtttcgagcggttttcgtgcgtttcgaaggtgggggcggtgggggcggtgggagtatcgttgagtcgggaattataggaatagatggtgtttgtttaggtcgcgtgttggagtcgttttttaggataggagtaggtttcgggtttttaggcgtgtatgtttaggtgggagcgtcgttaatttttttcgttttgttggtaggtattggtgatttcggtcggggtaggtttcgggattcgataatatggtttttttattttattagtagttgttgtattattatagtatcgaggtgagttgcgattttagcggggatagtaatagcgtgcgcgttaagattaattttaagtagttgttttttaatagttattttaagtattgtaaatatagtattttttttagttgtagtagttttggggatttcgggggcgtttttcggcgagtgggcggcggaggtcggttgcgtaggtagaagaagttgttttagttgttcgagagggtttttagtcgttggtgggattttaagttcgattcggtgaatttggaggaggtttgtttggagcgttgtttttcgtagatttagcgtcggtttcggtatgcgtttttttatatcggtttcgtttgttttttgtggagtatttattttgcggtttatatgagatttagattgatcgttatggtcgttttcgcgttgtgtttttttttggtgtgtgtgggtttttttttgtttatttttattaagttgtacgttcggtattacgcgtggatttcgttggtttttattttgttggtgttcgttttgattttggttgcgtagttttaggttttgacgtttgttttaggacgcggcgatagttttaattttacggttatagttcggtttatagatatttgtttattttaagtggggagtttttttatgtgtatcgaagtgttttttttgttttatatcgttatgtatttatttttgtatttgagtttgtgtttgggggtggtttattttgtttttttcgagatttttggttattattttcgggatgaagtttgttttttttcgttcggagtcggggttttgtattgggagttgttgagtagggggttgttttacggttgtatttacgttatcggggtttatttgttcgttatgttttaggtgaggtttaggagtattttttttaaggtggggtaatttattatgtacgggaaggatttggaagtggaaaaagtttttaaagagaggatgatttatttcgtgatgttaagaattatagtcgatgatttaatgaagtagggagatgaggagagtgagaattttgttaagaggtatgttatttcgagttttaagaataggaagaaaaagttttttatttaaaaagtttttatagtttttcgtttttttaagatgtagtagatcgaagaagttagtattttatttgtagatatcgtgggttttattaagatgagtgttaataagtttgtttacgttttggtgggttttttgaacgatttgttcggtcgtttcgatcgtttgtgtgaggagattaagtgtgagaaaattagtattttgggagattgttattattgcgtggcgggttgtttcgagtttcgggtcgattatgtttattgttgtatcgagatgggtttgggtatgattaaggttatcgagtagttttgttaggagaagaaggaga

SEQ ID NO: 412 - DNA, 2264 bp, Artificial Sequence; identical to SEQ ID NO: 340
  Description of Artificial Sequence: Synthetic polynucleotide

SEQ ID NO: 413 - DNA, 2264 bp, Artificial Sequence; identical to SEQ ID NO: 341
  Description of Artificial Sequence: Synthetic polynucleotide

SEQ ID NO: 414 - DNA, 1334 bp, Artificial Sequence
  Description of Artificial Sequence: Synthetic polynucleotide
gggcgttttgattttttttttattttgttttttcgggttttattcgtttgtttttggattttcgtttttttttgtttttcggttttttagagttttttttttatggtagtagtttttcgcgttttcggcgtagttttttagcggacgattttttcgtttcggggttgagtttagtttttggatgttgttgaaattttcgagattatgcgcgggtttggttgttgttttttcgtcgggtgttattgttatcgtcgtcgtttttgttgtcgtcgttcgcgggatgtttagtagttcgttgttcggttttcgcgattttgtgtttttcggaagtcgtttgttgttgtagagttgtacgaattagttatggtgttgtgggagttttcgcggtagtgtagtagttggatattttgcgagggtttttgttggttgttgttgttgttcgttatgttatttatcgtagttcgttcggtgaagttcgttgttttttttatttttttaagtgattgttaaacgtttatcggttggaattgttttggtaagtttagaattttcgttttcgattttttaatttcgtagaagaatacgcgtatttagtatagattagtttattttagcgcgtttttttagttttttattttttattgttttagatttttaatattatttatttttatttagagaaataaggggaattgttgtaggttcgggggtgaggggtggttttgggatgggtagaaagtgtaggtgtagtaggaaatttttgtatgtttgcgtttatattggagttgcgaggattttgagaaatattaaacgggatggttttttgggtttattgttttgaaagagtattaattttaggggaaatattgaaatagaagttttgttattattaaagaaaaaagttttattaggatgaggaagaaataattttatgagaaagaatgagcgagaaagtaataaattaaatggtgattgtaggggaatcgttgatttttggtaaaggtgttatgaggtcgtattggtttttcgttgaagattaggttatatagattttagaggagttgggttttaatagaatttttttttttttttttttttttttttttttttattttttttttttttttattttttttttttttaggcggtaaaagatattggttttgtagtttagatatgtttttttttttgtttttttaagttttaaggtagtataggggagttgagaaaaagaatattttgcgggttttttaggtcggagtgggtatgattgaggttggttaggttttatgtaggcgagtcgagggcggaattcgattttagtgggcgttgat

SEQ ID NO: 415 - DNA, 1334 bp, Artificial Sequence
  Description of Artificial Sequence: Synthetic polynucleotide
gttagcgtttattgaagtcgggtttcgttttcggttcgtttatatggagtttgattagttttagttatgtttatttcggtttgggagattcgtaaagtgtttttttttttaatttttttgtattattttgaagtttagggaagtaaagagaggggtatatttggattgtaaaattaatgttttttgtcgtttaggagagaagggaatgagagagagagagagatagagagagagagagagagagagagagagagaaattttattgaaatttagtttttttagaatttgtgtgatttggtttttaacgggagattagtgcgattttatggtatttttgttaggaattagcgatttttttgtagttattatttgatttattgttttttcgtttatttttttttataaagttattttttttttattttagtaagatttttttttttaatgatgataaagtttttgttttagtgttttttttaggattggtgtttttttaaaatagtgaatttagaaaattatttcgtttaatattttttaaaattttcgtagttttaatgtaagcgtaagtatgtaaaggttttttgttatatttgtattttttgtttattttagaattattttttattttcgggtttgtaatagttttttttgtttttttggatagaggtgggtggtattaggggtttagggtagtaggaggtgaggggttgaggaggcgcgttagggtaggttggtttgtgttggatacgcgtgtttttttgcggagttaaagggtcggggacgggggttttggatttattagagtaattttagtcggtgggcgtttggtagttatttaaggaggtagggaaagtagcgagttttatcgggcgggttacgatgagtagtatgacgggtagtagtagtagttagtaaaagttttcgtaaagtgtttagttgttgtattgtcgcggggatttttatagtattatgattagttcgtgtaattttgtagtagtaaacggttttcgaggaatataggatcgcgggggtcgggtagcgggttattgagtatttcgcggacggcggtagtagaggcggcggcggtggtagtggtattcggcggggaagtagtagttaaattcgcgtatgatttcgagagttttagtaatatttagggattgggtttagtttcggagcgagagggtcgttcgttgagaagttgcgtcggagacgcgggaagttgttgttataaggagggagttttgggaagtcggaggataggaggagacgggagtttaggggtagacgagtggagttcgaggaggtagggtggagggagagttaaggcgttt

SEQ ID NO: 416 - DNA, 2501 bp, Artificial Sequence
  Description of Artificial Sequence: Synthetic polynucleotide
tttttgaaaattgttaataaaaattcgttggttttacggtttagggggtattacggaatttgcggatatgtgatgttttttttggatattcggttttaaaatgttttttttttgtattttttttttttattttttaggttagtcgatatttagggaaaataggaaaggatttacgtgaaatattgggggttgaatttttttcgataataagttttttaaaaaagatttttaaatgaaatttttttgttttttaatttttatttttgttttgggggtatatgtgaaggtttgttatataagtaaattcgtgttttcggtgtttgttgtatagaatattttattatttaggtattatgtcgagtatttaatagtttttttttttgtttttttttttttttttattttgtattttggagttaattatagtgtttgttgtttttttgtttgtgttataagtttttattatttagtttttatttataagtgagaatatttagtatttggatttttgtttttgtattagtttgttaaggataatagtttttagttttatttatgttttataaaagatatgatttagttttttttaatggttgtattaaatgaagttttaaagatataatataaatattaattttttttttattataaaaattttttgttgaatttgattatatttaaattaacgagttttgttttatgaaagattttttggataaatttgatagttgatggaataggagaagttgtttgttatgtttaaagttaataagagattaatatttagaataaatggagatttgtaaattaatagaaagtaggtagtaaagttaaagaaaatagtttaaggtatagttattaaaaggaacgtgattatgttttttgtagggatatgggtggagttggaagtcgttagttttagtaaatttatataggaatagaaaattagcgagatcgtatggttttatttataagtgggagttgaataatgagaatatatggttatatggcggcgattaatatatattggtgtttgttgagcggggtgttggggagggagagtattaggaagaatagttaagggatattgggtttaatatttgggtgatgggatgatttgtatagtaaattattatggcgtatatatttatgtaataaatttgtatattttttatatgtattttagaattttaaataaaagttggacggttaggcgtggtggtttacgtttgtaattttagtatttttgggaagtcgaggcgtgtagattatttaaggttaggagttcgagattagttcggttaatatggtgaaatttcgtttttattaaaaatataaaaattagttagatgtggtacgttatttataattttatttattcgggaggttgaagtagaattgtttgaattcgagagcggaggttgtagtgagtcgtcgagatcgcgttattgtattttagtttgggttatagcgtgagattacgttataaaataaaataaaataatataaaataaaataaaataaaataaaataaaataaaataaaataaaataaaataaaaaaataaaataaaataaaataaaataaaataaagtaatttttttttttttaagcggtttttattttttttttttgttttgtgaagcgggtgtgtaagtttcgggatcgtagcggttttagggaattttttttcgcgatgtttcggcgcgttagttcgttgcgtatatttcgttgcggttttttttttgttgtttgtttattttttaggtttcgttgggatttgggaaagagggaaaggttttttcggttagttgcgcggcgatttcggggattttagggcgtttttttgcggtcgacgttcggggtgtagcggtcgtcggggttggggtcggcgggagttcgcgggattttttagaagagcggtcggcgtcgtgatttagtattggggcggagcggggcgggattatttttataaggttcggaggtcgcgaggtttcgttggagtttcgtcgtcgtagttttcgttattagtgagtacgcgcggttcgcgttttcggggatggggtttagagtttttagtatggggttaattcgtagtattaggttcgggttttcggtaggtttttcgtttatttcgagattcgggacgggggtttaggggatttaggacgtttttagtgtcgttagcggtttttagggggttcggagcgtttcggggagggatgggatttcgggggcggggagggggggtagattgcgtttatcgcgttttggtattttttttcgggttttagtaaatttttttttgttcgttgtagtgtcgttttatatcgtggtttattttttagttcgaggtaggagtatgtgtttggtagggaagggaggtaggggttggggttgtagtttatagtttttcgtttattcggagagattcgaatttttttattttttcgtcgtgtggtttttatttcgggttttttttttgtttttcgtttttttcg

SEQ ID NO: 417 - DNA, 2501 bp, Artificial Sequence
  Description of Artificial Sequence: Synthetic polynucleotide
cgggagaggcggggaataggaaggaggttcggggtaaaagttatacgacggagggataagggggttcggattttttcgggtgggcgaggggttgtgggttgtagttttagtttttgttttttttttttgttagatatatgtttttatttcgaattgggaaatagattacggtgtagggcggtattgtagcgaataaagaaaagtttgttggagttcgggggaggatgttaaggcgcggtgagcgtagtttgtttttttttttcgttttcggggttttattttttttcgaggcgtttcgggttttttgaaagtcgttaacggtattggggacgttttgggttttttaggttttcgtttcgggtttcgaggtgggcgaggagtttgtcgggagttcgggtttgatgttgcgggttggttttatgttgggagttttgagttttattttcggggacgcgggtcgcgcgtatttattggtggcgaagattgcggcggcgaaattttagcgaagtttcgcggttttcgagttttataagggtggtttcgtttcgtttcgttttagtgttgagttacggcgtcggtcgtttttttggagggtttcgcggattttcgtcggttttagtttcggcggtcgttgtatttcgggcgtcggtcgtagaggggcgttttggagttttcggagtcgtcgcgtagttggtcggggaagttttttttttttttttaggttttagcggggtttagggagtaaatagatagtaggaagaggatcgtagcgaagtgtgcgtagcgaattggcgcgtcgggatatcgcggggggaaattttttaagatcgttgcgatttcggagtttgtatattcgttttatagggtaggggagaggggtggaggtcgtttagaggaaaggaaattgttttattttattttattttattttattttatttttttattttattttattttattttattttattttattttattttattttattttgtgttattttattttattttatgacgtagttttacgttgtggtttaggttggagtgtagtggcgcgatttcggcggtttattgtaattttcgttttcgggtttaagtaattttgttttagtttttcgagtaggtggaattataggtggcgtgttatatttggttgatttttgtatttttagtagagacggggttttattatgttggtcgggttggtttcgaatttttgattttaggtgatttgtacgtttcggttttttaagagtgttgggattataggcgtgagttattacgtttggtcgtttaatttttatttgaagttttggggtatatgtagaggatgtgtaggtttgttatataggtgtgtgcgttatgatggtttgttgtatagattattttattatttaggtattaagtttagtattttttagttattttttttggtattttttttttttagtatttcgtttaataggtattagtgtgtgttgatcgtcgttatgtgattatgtgtttttattgtttagtttttatttataagtgagattatgcggtttcgttggttttttgtttttgtgtgagtttgttgaggttaacggtttttagttttatttatgtttttgtaaaggatatgattacgttttttttagtggttgtgttttaggttattttttttggttttgttgtttattttttgttgatttgtagatttttatttattttagatattgattttttgttggttttagatatgatagatagttttttttattttattaattgttaagtttgtttaaggagttttttatgaaataaaattcgttaatttaagtgtaattaaatttagtaagggatttttgtggtggggaagaggttggtgtttatgttgtatttttaaaattttatttaatgtagttattaaaaagaattagattatgttttttgtgggatatggatggagttagaggttattatttttagtaaattaatgtaggaatagaaatttaaatattggatgtttttatttgtaagtgggagttaaatgatgagaatttataatataaataaggaaataatagatattgtggttgattttagggtgtaggatgggaggaaggagaggagtagaaaagagaattattgggtattcggtataatatttgggtgatgaaatattttgtataataaatatcgaagatacgagtttatttatgtaataaatttttatatgtatttttaaaatagaaataaaagttaaaaaataaagaaattttatttaaaagttttttttaagagatttattatcgggggaaatttagtttttaatattttacgtgggtttttttttattttttttaagtgtcggttggtttgagaaataaagggaaagagtataaaagagagatattttaaagtcgggtgtttaggggagatattatatgttcgtaggtttcgtgatgttttttgagtcgtaaaattagcgagtttttattagtaatttttaaaga

SEQ ID NO: 418 - DNA, 2327 bp, Artificial Sequence
  Description of Artificial Sequence: Synthetic polynucleotide
ttttttattttttttatcgttatttttgttttcgggttattgtttttttttgtaagttttgttcgttggatttcgttgtttttgcgcggtcgttttattatttacgtttgattggaggaaataaaattggcgttggttttttaattttaagtttcgtgtttgattgggggaggggttatttaggtatttttttttttaaatagaagaaatttaggtattaattgtaaatatttcgttgttttttttgaaagtatgtattatattagtcgaggttttggagatatacggtttattatttatttttagtttttaggtaaagaattttatggagatttattagtaaaattagattttttaagggaaattattaggacgtttttagattttttttaagggatattattggttgtcgattatatttgagtatatttttttttagtttatttttattattttattttgggattattttaaggaaattagttatttgtagaaagtttgaaatttcgaaaggagaggtataatttagggtaaaagagatcgagtgaagttttttagattgattgtttttattggggttattttttataaggtcgggagtggagaggagtgtttgtagaagagagattatttttaaaggggttttttcgaatttaggaggtgagggggattttttagagttgttattatttgtaggtggatttgttattattatgtagtgttttttggggagttagtttgttttttttagagttttttttaggtattgttttagagtttaggggagtttttagcgtttttttcgtttgttttgagggtattgtatgtataaaagtttttttacgcgcgcgcgtatatatagatatttagcgggtttggagtgtatttttgtttatttgttattacgtggtaaattttagatttggaagttattattatgcgggcgcgtattaggatttaggggagattgtgtggggttgggattgcgtataaatataggggtcgtacggaagttttgtatattttaaagtgtaatttgagttttcgcggttttagttttatttaaaatatgtaaatttttgaaattgaaaaatttgaaaaattttcgaagagttttatttgaataaatttaaatttattgggagtcgttttgaggagataaaacgtatagcgatttggggtgagggatatttgtggggaggtaggacgtgttggattgggtttttagggttaaggtgtttttgggttttcgacgatagttttagcgtagagtagggaagtggtatcgttaggtagtaagtttagttgttttatttttgtgatttatgagttagttttgaggttttggttttagggtttagtttttatttatgtcgcgtttttgagagtttaatattgtgtttggtatatggtaggtgtttattgaatagtcgtggtatgaatgaatgaacgaatgaatgaatgaatgaatgaatgaatataagtttaatgggggaaattcgggttttttaataaaggtaggggttgggggatatttaggggtttttttaggaggatttttttttttattattttatttttgggagaaaggtttacgtaggatggtcgttttttttttgttgagagttttgtttttagtttatttgggtcgttggaaaagaggagaagaataaataagagataagtaattatttttttatcggcgtttcgtttttgtttttattgttaaatttattttaaagtcgaggatggtgagattgtgaagttgtaaagaaatatagagtttatttttttaaagaattacgatatatttaaagtttgttttttttaggtttttttttttggtttttgttttttttttttttcggttttttgtttttgattgaattttatgggatagagaattttttgttttttacgaggtaaggcgcgaattcgtagagatttggggtgttttttggttttttgcgttgttttggaggcgtttatagaggtttttgtcgttaaggatagtaattgttttattttcgatggttgttcgttaggtttgcgggtcgcgggtttatttagtcgtcgaattttttagtcgttattagcgttgtttttaatttaatggaataatgtaaattatagtttgtttagttgatacgtttttgcgaatgcgtcggggttgagttttggttagtcgttttttcgacgttttggacggtcggagggaatgaagttttgaattgtgataaaagtggggggggggtattttaaatttttaaagtaatgtttttttttttttttttttttttaagtaattgagttttattaaatgtcgg

SEQ ID NO: 419 - DNA, 2327 bp, Artificial Sequence
  Description of Artificial Sequence: Synthetic polynucleotide
tcgatatttggtaaggtttaattgtttaagaaaaaagaaaaaaaaaagaatattgttttgagaatttggggtgttttttttttatttttgttataatttagagttttatttttttcggtcgtttaggacgtcgagagagcggttggttagagtttagtttcggcgtattcgtagggacgtgttagttgggtaggttataatttgtattattttattaagttaggagtagcgttgataacgattggaaagttcgacggttgggtgggttcgcgattcgtaggtttggcgagtaattatcgaaaataaaataattgttgtttttggcggtaaaggtttttatggacgtttttagggtagcgtagggaattaaagggtattttagatttttgcgggttcgcgttttgtttcgtgggggataggaggttttttgttttatgaggtttagttaaggataaggagtcgggaggggaaaggggtaggagttaaggagagaaatttgaaagaggtaaattttaaatatatcgtaattttttaagggggtgggttttgtgtttttttgtaattttatagttttattattttcggttttggagtggatttggtagtgaggataaggacggaacgtcggtaggggagtagttgtttgttttttgtttatttttttttttttttttagcggtttagataggttgaaggtaaaatttttagtaagggggaagcgattattttgcgtggattttttttttaggggtgggatgatgaaaaaagaaatttttttggggaagtttttaggtattttttagtttttatttttattaggaggttcgggttttttttattaaatttatatttatttatttatttatttatttattcgtttatttatttatattacgattatttagtgagtatttattatgtgttagatatagtattagatttttaaaaacgcggtataaatggaaattaggttttgaagttagagttttaggattggtttatgggttataaaagtagagtaattgagtttgttgtttagcggtgttatttttttgttttgcgttaaggttatcgtcgaaggtttagagatattttgattttggaaatttaatttagtacgttttgtttttttataaatattttttattttaaatcgttgtgcgttttgtttttttaaagcgatttttaatggatttggatttatttagatagaatttttcggaagttttttagattttttaattttaagaatttgtatgttttaagtgaagttgaaatcgcgaaggtttaggttatattttaaaatatgtaaggttttcgtgcggtttttgtgtttgtgcgtagttttaattttatatagttttttttggattttgatgcgcgttcgtatagtgatgatttttaaatttggggtttattacgtggtgataaataaataggggtatattttaaattcgttggatgtttatgtgtgcgcgcgcgcgtgaaggagtttttgtatatgtaatatttttagggtaaacggagaaagcgttaaaggtttttttgaattttgggatagtatttgagggggattttggggagaataggttggttttttaggagatattatatagtgatgataaatttatttataggtggtgataattttaggaagttttttttattttttgagttcgggagagtttttttaaaggtagttttttttttgtagatatttttttttattttcgattttatgaaaagtggttttagtggagataattaatttgaaaagttttattcggttttttttattttaggttgtgttttttttttcgggattttaagttttttgtaaatggttaatttttttagggtgattttaaaataaaatggtaggggtgggttagagaagagtgtgtttaagtgtaatcgataattagtaatattttttgaagagagtttgaagacgttttggtaattttttttaagaaatttggttttattggtggatttttatagaattttttgtttagaggttggaaatgagtaataggtcgtgtgtttttaaggtttcggttaatatgatatatatttttaagaagagtaacggggtgtttataattagtatttaaattttttttgtttgaaaaaaaaaatatttaaataattttttttttaattaagtacgaagtttggaattaaaaagttaacgttaattttattttttttagttaagcgtgagtgatggggcggtcgcgtaagggtaacggagtttagcggataaagtttgtagagaggggtagtggttcggaggtaagggtggcggtggggggggtgggggg

SEQ ID NO: 420 - DNA, 2280 bp, Artificial Sequence
  Description of Artificial Sequence: Synthetic polynucleotide
attagtatagaattgttattataggattgtagtttaagtattagagtgatattaattggttatgtttaattgttttaaaattattttttaaataattatattgatattataatagaaattatgggtatttattttatatttagatggaaggtattattggatatgtattaaaaaaaagattttttgaaaaaaataaaataaaataaaatattattattaaaataaaagaatttaaaataatttttaaaaattttttttaataaaatatattgttaatttataaaatggattgatgattagttatgtaaatgttttaaataaaatttttatattttttttatagttaatttatgttttgaattgtttattgattataaataatggtgaaatggtattttttgattatattgtattttgtttatagaaagtttgatatgatggaatttattaggtaagagggtgggtgttgtgaatgagatgttgtttttagttgtgggggtgggtagagtttttggagtgtgtggattttatgtgagttatgtagtattttttgttttttgttagaagttaaagttatttatttataatatatttatgtttttgtgtaattgtttatttttgtgtagttaatagggagttattatggggttaatttataggggaaaaatagatatttatttttttatatagatgtggatatatgtatatatgtatagaattgtggtatttaattttataggttttggggttgagggtgagggtattgttagtttttttagtagggttgtgttgggttttttgttaaaaggggtttttagtaaagagtgagttggttgtgtttttttagttttttatagtttgttttttgttttaaggagggagttaagtaaggggttaggtttttttggttgtgtgagtttatagttatttatttatttatgtttatttaggttgatggtgtggggatttgggtatatgtttttttagtttttggggtgtttgtggtggggaaggatgtattgttttttttttgtttttttttattggggttggggttttagtttgagagtgagtgagagttatagttatatattttgtgggttttatttgtgttgtaaggtttattgtgttagtaggaagagttatagattgtttgtagggaattaattttggatgtggaggagttggtattttgttttttggattgtttttggttttttaggataaatatgagtatgtttattatggtgaaggtggaggtgataaatattagtagtagttttgggattaatattgagatggatattttgttggtgtttaggtaggagttggagtgtgttttggtttttgttaatttagtgttgtttttattgtgtgaagttaatgtgggtgagattttagtgtatagttgagggtagattttgttattggagaggagtatgaaattttttttaaagaagtttattggtgttttatatttgaggttgtttattagtattttggaatttaagtgttttgtttattgtttgaaaggtataattgtgtaggagtatttttaggggtttttgtggaggtttatttggatgatggaggttaattggtttagtatttttgttattgggaggtatatgaagtaattgttgtgtaggttgagtttagagagtgagattttagtgaatatgtttataggtagggattttagtaggttgttgttgagaatgaggatttttagtttgggtatggtattgaaagtgtttgggaggatgagttggatagtgttgtattttatgtttaggtattttaggttttgtagttttgtgaattttttttgggatagtgtgtttaggtaattgttatttatgtatagttatttgaggtttaaaaggtttttgaaagtgttgttttttatagtagtgatgttattgttgtttagatttaatagaatgaggtttttgtaatttataaagtgtgatttttggatgttgtggattttgttattttgtaggaaaagtttttgtatgttagagagtttgggttttaaattagttaagttgtttatgtttttgttgttgtagtttatttttaaatttgattttgggatgtggttgtagttgtagtttttagggtagggtaaattgttagttaagggtttgtttttggagttatttgttgttattgttgttgtgggtttgattttgatttgttagttgtttgggatttttgtatttttgtttggagtagattttggtgtggtatgatttttttgtttatttgttttga

SEQ ID NO: 421 - DNA, 2280 bp, Artificial Sequence
  Description of Artificial Sequence: Synthetic polynucleotide
ttaagataaatgggtaagaggattatgttatattagggtttgttttaaatggaggtataaagattttaggtaattggtagattaaaattagatttatagtagtgatagtgatgggtagttttaggaataaatttttagttaatagtttattttgttttgggggttgtagttgtgattatattttagggttgggtttaaagatgaattgtaataataggaatgtgagtagtttggttgatttgaagtttaagttttttaatgtgtaggagttttttttatgagataataagatttatagtatttgaaaattgtattttgtggattataagaattttattttgttggatttgggtaataataatattgttattgtagagaataatatttttaagaattttttggattttaggtggttatatatggatagtaattatttggatatgttgttttgggagaaatttgtggggttgtaaaatttagagtatttgaatgtggagtataatgttatttagtttatttttttgggtatttttaatgttatgtttaaattgaggatttttatttttaataataatttgttgaggtttttgtttgtggatgtgtttgttggggttttgttttttaaatttagtttgtataataattattttatgtattttttggtggtaggggtgttggattagttaatttttattatttagatagatttttatggaaatttttgggagtgtttttgtataattgtgttttttaagtagtgggtagaatgtttgggttttgaagtgttgatgagtgattttaagtgtgagatgttggtgaatttttttagaaaggattttatgtttttttttaatgatgagatttgtttttagttgtatgttaggattttgtttatgttaattttgtatagtaaaaatagtattgggttggtggagattgggatgtattttaatttttatttagatattagtagggtgtttattttggtgttggttttgggattgttgttggtgtttgttatttttgtttttattgtggtgggtatgtttgtgtttattttgaggaattgaaagtggtttaagagatgagatgttaatttttttgtgtttgagattaattttttatagatagtttgtgattttttttattggtataatgggttttataatgtagatggggtttatagagtgtatgattgtggtttttatttgtttttagattaagattttaattttaataggggagggtagagggaaggtgatatatttttttttattgtaggtattttgggggttggaggggtgtgtatttaaatttttgtgttattagtttggatgggtataagtagataaataattgtgagtttgtataattgaaagggtttgattttttatttagttttttttttgaaataaagagtagattgtggagagttgggagagtgtagttagtttgttttttgttgagagttttttttgatagaaagtttagtatgattttgttggaagaattgatagtgtttttgtttttggttttggggtttgtggggttggatgttgtggttttatatatatatatatatatttatatttatatagagagatagatatttattttttttttgtggattagttttgtgatggttttttgttggttatgtagggatgggtagttgtatgaaggtatgaatgtattgtaaataagtaattttgatttttgataaaaaataaaaagtgttgtatggtttgtatggaatttatgtgttttagggattttgtttgtttttgtgattggagatggtattttgtttatagtatttatttttttatttgataagttttattgtattaaattttttataaataaaatatagtataattagaaagtgttattttgttattatttgtgattggtaggtagtttagagtataagttaattgtgaaaaaaatgtaaaggttttatttaggatatttgtatggttagttattagtttattttatgagttaataatgtattttgttgagggaagtttttaggggttgttttgggtttttttattttgatggtgatgttttattttattttattttttttagggggttttttttttaatatatatttaataatgttttttatttgaatgtaaaataagtatttatgatttttattatagtattagtgtaattatttaaaaaatgattttgaggtagttaagtatgattaattaatgttattttagtgtttaggttgtgattttatggtagtaattttgtgttggt

SEQ ID NO: 422 - DNA, 2477 bp, Artificial Sequence
  Description of Artificial Sequence: Synthetic polynucleotide
tggtatagatatggtttttaaagttaaaaattatgatggagtgaaggatagttgtgtttagatttgtgttttgttttttggaggttgttgtggttttggggatgagttggaggtgggtaggtagtggtttttggggtttgtagtagggaggttattatttgtatagtagaatatagtattattttatagggagtattttggggtgggtagtaattttggaggtatttttgggaaggagttaggtatgggggaggtggaggtgattttagaagtagaggagttgttggggagttatggttttttgggtgtggagttgtggaggatgagtgttattttttttttttgggttttttattttgtagggatttttatgtttaggattatttgattgttaaggttttggtatttttgttaggttagttgggggttaaggtttttaattttgaggattggggttgttaatatgggtagtagtataggaggttgagaggaggtttataagggttgtattttttttttggttgtagtttattttttagagtagggtgggtgtggagttatttttattagtattgttggttttgagggtttggtgggtagtgttgtttggtgtgggggatagtttttgagtaggttgttgtatttttggtattttggtttttttgggatttttaggtggtttatgtttggtagtgtttgttttttgggtttttagggtttgtttttgttgtagtttttgtagtgggagtattgttgagtattgtttttgggagaggatgattttaggttttatagttaagttgttttgaggttaagtgttttggggtttagggagttttagtagtagttttgtatggttaggtttgggttatggtgttgtttagtggtttttgtgtggttagtatttgaatggttgtttgtttggtttggtgtgttttttttttttgggttttttttttggttgtttttttttgttggtgtaggtttaagagggtttttttgtttgattgttgttgttgtttttgttaaagaagttggtgttatgtggtgtttatatttggaagatggaatttagatttagattagaggtttttttataatgttttggagttttttagagtttgtggaattttagggttagtagggaaagtgaaattttattaggattttgaatttgttatttttttgttttatagaggatgagttttatgttgtaggtggttaatagttttggtgtgggggagatagttttgtttttatagaatgtttttttgagattttttagtttgggatggatttagtaggtgttttttgatatttaggttttgaggattgttagtgaggattattttgattgtttgtggggatttagggttaagaaggatgttgtatttagagatggggtttatgagtaattttaggttttgattttatttgttttagaaatttaaatttttgggattttgggttagattttttgggggagtatggagtgattgagatgtttatattgattttttgtttggtttgaagtaagtgttttaggtgggtagtttttgttttgtgttgttgtatttggtgttggtattagtgttggatggtgatagtggtttggtttatttggtggataaatttgtttggagagtaggatttagggttaagataggattagtgttttggtaggatttagttggttgttggtggaaggttgagttggggaagagagaagttggtggttgtatttaagtagttttttttataaggtaggattagtttatttggattatttttatatggtaggattagttgtttggattagttttattaaaatttaaaattttttttttgggaaggtgtttaggggagaggaaatgtttatttatgtaggtttgtgtggttttatttataattgttaggaagtgggaagagtttaaatgtttatgatttggttatagtgtgaatattggatggtgggattttatttataggtaataggtttgggatttaggttagtgtagattataggttgtggttttatagagagggtggttggaataggtagggttatgagggaatagattggtggttgttggtatttgggtggggaaggagtttgagggaagtttggtggtgttgggttgtttttttattttggtttgttgtgtttatagatagtattatatattttggtggaattttatggaattgtatatttataatgggtattttttattgtatataaattatattaagtaaaattgattaagtaaaaaaaaaaatgttttattttggtttttgggattatgtgtggatttttttagtaaaggtattaatagagaatttagaatgtgtgagttttagtttgggagtagtttgttttgggtagaattggggggttttaaggggttgtgggtttttggtttttttttttttgtgttatttattgtgtttataggtttggtttttttagttttaat

SEQ ID NO: 423 - DNA, 2477 bp, Artificial Sequence
  Description of Artificial Sequence: Synthetic polynucleotide
gttagggttagggagattaggtttgtagatgtggtgggtggtatgagggaagggggattagaagtttgtaattttttgaagttttttagttttgtttggggtagattgtttttgagttagggtttatatgttttgggttttttgttagtgtttttgttgagagaatttatatatggttttgagagttaaggtgaagtatttttttttttgtttaattagttttatttagtataatttgtatataatagaaggtgtttattgtaagtgtgtagttttatgagattttattagggtgtatagtgttgtttgtggatatagtagattaagataaggaaatggtttagtattattaggttttttttgagttttttttttgtttagatgttagtagttattagtttgtttttttatagttttgtttgttttgattattttttttgtggagttatggtttgtggtttgtattggtttgagttttgggtttgttgtttgtgggtagggttttgttatttagtatttatgttgtagttaggttatgggtatttgaattttttttattttttggtaattgtaaataaggttatataggtttgtgtgggtaggtgtttttttttttttgggtatttttttaggaagaaggttttgggttttagtggagttggtttaggtggttggttttgttatgtgaaaatggtttaggtgggttggttttgttttgtgaaaagggttatttgagtgtagttgttggttttttttttttttggtttgattttttattagtagttagttgggttttgttggggtgttggttttgttttggttttgagttttgttttttgggtaggtttatttattaggtgaattaggttattgttattatttagtgttggtattggtattaggtgtagtggtgtggagtaggagttgtttgtttggagtatttgttttaggttaagtgggaggttagtgtgggtgttttagttattttatgtttttttggggggtttggtttagaattttaggggtttgagtttttgggataggtggaattaaagtttaggattgtttgtgggttttgtttttgggtgtagtattttttttgattttgggtttttgtggatagttagggtggtttttattggtggtttttagggtttgggtgttaggaaatgtttgttgggtttattttaggttggagagttttaggaggatgttttgtgggggtagagttgttttttttatgttagaattgttggttatttgtgatgtagggtttattttttgtagagtagagaaatggtaggtttaaggttttggtggggttttattttttttgttggttttgagattttatgaattttaggggattttagggtgttgtggggaaatttttggtttgggtttggattttgttttttagatgtaaatgttatatggtattggtttttttggtaggagtagtggtagtggttaggtgaggggatttttttggatttgtattagtagaaagaggtagttaggaggaaggtttgggaggagaaggtatgttaagttaggtgagtagttatttaggtgttgattgtgtagggattattgagtagtattgtggtttaggtttgattgtgtggggttgttgttggggttttttgggttttgggatatttagttttagggtagtttggttgtggagtttggggttgtttttttttagggatagtgtttagtgatgtttttattgtaggagttgtaatagaaatgagttttgagagtttagaaggtgagtattgttgagtgtgggttatttgagaattttagggagattagagtgttaggaatgtggtagtttgtttaggagttgttttttatattaggtggtattgtttattaggtttttaaggttaataatattggtgagagtggttttatgtttgttttgttttggggggtggattgtagttaggaaggaagtgtagtttttgtggatttttttttggttttttgtgttgttgtttatgttggtggttttagtttttggagttaggggttttggtttttagttgatttgatgagggtgttgagattttgataattaaatggttttggatgtagggatttttatagagtagaaggtttggaagggaggggtggtatttattttttatagttttatatttagaaggttgtggttttttagtggtttttttgtttttggggttgtttttgttttttttatgtttggtttttttttgggggtgtttttagagttgttgtttgttttgggatgttttttgtggaatggtgttgtgttttgttgtgtaggtggtggtttttttgttgtaggttttggagattgttgtttgtttatttttgatttatttttagaattatagtagtttttagaggataggatgtaggtttgagtatagttgttttttattttattatggtttttggttttaagggttatgtttgtgtta

SEQ ID NO: 424 - DNA, 3685 bp, Artificial Sequence
  Description of Artificial Sequence: Synthetic polynucleotide
taagtttttttttttggtgtataggtatgtagttataggttaagttgtgatgtgagttttgtgtgtgggatttttgtaaaaggtttgtttgatgtgttgggtgggaattgagtttgggttaattgtttggaaggtaattatgtttattattatattattaatgttgtatggtgtgggtagttttgttgtgttggtttggggtttttattagtgtgttgttgatgtttggggtaggttggttttgatgtttggtttgtttgtttgtttgtagttttgtgttgttgtggtttttttaaaggttgttttgtgttttattggtgtaaggttagtgtggttgatttgttatgtttgtttgtttttgggggtgtttttgtttatttgttgttttgggtttttagagtttttttttaataggtgtttgggggggaaatggttggtgttggtagggtttttatttttatgttttttattgggtgtagggttttgtgtgttgtagaaagttttttttgataattattttgagttggtagtttgttgggtgttgtgtagggttagaggaggttttttggttgttgttattaagttgtggatgagaagaaaagataggaggttaaggaggtttagaaggttaaagggttaggtaggttaggtttgagatggtattttgtgattagttggagggtggaggaaggagaaggagggtttataggttgggtttgaggtggtggtttaaaaagtatggttgtttttttgttggggaattgaattttggttttttgtgtgataggtggggatatttattattatattaatgaggatgatggtgatggttgttgggatgttagattttattttgattgtggatgtttagttttgttttgatttttttttttgatggtaggggttgggtgtgtgtttgttttttatttgttgtttgttgtttgttatttgttatatgttatttgttatttgttatttgttttttgttattgttggtatgatttattttgatatttaataaagtattttgtgattttgttgggatttggagttggagttggattttgataggtattggagtggtgtggaatttttttgtgtgttttgtttgttgtttttaatgtggggattgtgttggggtaggaggaggtgtgggtgaaatagttaggttgttgtttttaggatgtggtgggtgtatgttttgtggggtttggtgagtggaggtgtgggggttggggtgtgtgttggtggtggttggtttgatgtggattttttgggtttggggtggggatgtgggggtgtttatgttaatgttagttggttttgtttatttggtgtttgttttttttgtgtggtttgttggttgtgtattgaatttagataggtgttggttaagggtgtaggtgtttgtgttgggttttagttatgttagtggtgaagtgttttggtgtgttgttaggatggttgagtggtttaaggtgttgtgtttaggttgtagttttttttggaggtgtgggtttgaattttatttttgataagttgattttttggtttgtttgttggagggtaatgtttatggtaattttggagtatttttggttgttttttgttttgagtttttgtttgttttttagattttagtttttttgaagtaagtttttaaaatgttgttgttttttaggtatgtttgttttttttgtttatttgttggttgttgtagaaatagtttaggattatgtgttagtgtttgtgattttttattaattgttttttggatagatgttttttttattattttatatgtttttttttttggttttatatatagtgagtgattgtgattattttttatgtttttttttgtttattttttttgtttgttttttttttatttgtttaaatagatatagtttagattttttttttatttttttttttttttttttttttttattggtttttgtttattgtttattgttttgaattgttgttgtgttgtttagaggtgttttggtttgaatagtttgtttggttttattttttaatttttgattgttgagtagtagtgagtgatttgtttgtggagttgtatatatgttttttattagaggtatgttatttaatattttgtttttttttttgattttttggattttggttgtgtattttattttgttgatattttagttaggttgttgattttattttgttatttgtgttttttttttgttaatatttgtttgttggtttatttgtagtttggatgtttgttggttagaggtagtgggaattttgtatatagttgggtaggtgagtttaaatttggaaagatagtttaagaggaattatgagtggaagttttagatttttgttatttgtttataaatgtttggttttgttgggattagttttgtgttatagtgtatttttatgtgggaagttgtggtttgggttgttttagttatatttagtgtgttttttttagggttagttagttgtggttttgttgaagtgtttttttgttttttttttgtgttttagtttttttattagtttagggggttggattttaagtgtgagttggtggtgtgggttagagtgtaggagtgaggtgtttatggatttggtttgtgtttttgagttgtatgttatggttgtgagatttgttttttattgttgtttttgtttgttgatatatttattttgttttttatttgttggtgatataagtgagaaggttggttttatggtggtgaaaaaaaaaaatattatatgaaagaaagaaagaaagaaagaaagaaagaaagaaagaaagaaagaaagaaagaaagatagaaagaaataataaaaataaaatataaaaattttgggtttgtgttggggatttgtgtttagtaaggtttgttatagtaaatttgtttatatgggtatttgggtgtgggttatggttggttttttttttggagattttggtgggtagttttttgattttgggtggtagagaaagtgtaagatgggatgagttggtttttttttttttgttttttttttgtgttttgttttaggttttttgatgtgatgagagtttttttttttgtttgttttattgggttagttttttgtggatgttgtaataggatggaggtttatggtaggtggtgattagtgaatggtggttggtggtgagttttgttgtgttagtttttgttggtgtttgttattggtgtatgggtggtttagtggtagaatttttgtttgttatgtgggaggtttgggtttgatttttggtttatgtagtatgtttttttattttggtgttgtagtagtattaaggtgtagttgtgtttgtttttgttgtttttttatatttggggtgtgtgagtgagtttggtattggttgtgtttttatgtgtgatggttttttgtttttttttttgtgttttttttgattgatttagggatgagtttattttttgtatttatatattttggtgataataatttttttagatatgagagtgtgttagatattagaatttggtagttttttggttttgtttttttttattgttttgttattgtttttgtttgatgtattttattttatggaatattgttaggtattatgggtttgtagttatttgtattattttttttttttatattttattgttttgtttttttt

SEQ ID NO: 425 - DNA, 3685 bp, Artificial Sequence
  Description of Artificial Sequence: Synthetic polynucleotide
gagagaggtgaggtggtgaaatgtgaagagaaggggtggtgtgagtggttgtaagtttgtggtgtttggtggtgttttgtgaagtgaaatgtgttgggtagaggtggtggtagggtaatgaagagaaataggattaggaggttgttaagttttggtgtttggtgtgtttttgtgtttggaggggttgttgttattaaggtgtgtgggtgtggggggtaggtttatttttaagttagttgagagaggtatggaagaaagggtagagggttgttgtgtgtgggagtgtagttggtgttggatttgtttgtgtgttttgagtgtaaggaggtggtagaggtgagtgtagttatgttttggtgttgttgtagtattaaaatgggagggtgtgttgtatgggttgggaattgaatttgggttttttgtgtggtaggtgagaattttattattgaattatttatgtattgatggtaaatgttaatggaagttggtatagtggaatttgttattagttgttgtttattggttattgtttgttgtgggtttttgttttattgtagtgtttatgagaggttggtttgatggggtgagtagaaggggaggtttttgttatgttgagggatttgaggtggggtgtggagggagagtggagggagagaggttgatttgttttattttgtgttttttttgttgtttagggttgagagattgtttgttggggtttttaggggaaggattggttgtggtttgtgtttgaatgtttgtgtgggtagatttgttgtggtgggttttgttgagtgtggatttttggtatagatttagagtttttgtgttttgtttttgttgtttttttttgttttttttttttttttttttttttttttttttttttttttttttttttttttttttttgtgtggtgttttttttttttattattgtggggttagtttttttatttgtgttattagtaggtgagaggtgggatgggtgtgttagtgagtgggggtggtgatggggaatgggttttgtagttgtggtgtgtggtttagaaatgtagattaggtttgtgggtgttttgtttttgtgttttgatttatgttattggtttgtatttggggtttggttttttgggttggtagggaggttggagtgtgagaaaggagtggaggagtgttttggtagagttgtagttggttgattttggagaaggtgtgttgggtgtggttgggatggtttaggttgtggttttttgtgtggggatgtgttgtggtgtagagttggttttggtggggttaggtgtttgtgggtgggtgatggggatttagggtttttgtttgtgattttttttgggttgtttttttgggtttggatttgtttgtttggttgtgtgtagggtttttgttgtttttggttggtaggtgtttgggttgtaggtgggttggtaggtaggtgttagtgggaagggagtataggtagtgaggtgggattggtgatttggttagggtgttggtagaatggaatgtgtggttggggtttgaggggttggaggaaaggataggatgttggatggtgtgtttttggtgggagatgtgtgtgtggttttatgagtgagttgtttgttgttgtttagtggttagaagttggagggtgaaattgggtgggttgtttaggttaggatgtttttgggtagtgtagtggtgatttaaggtggtgggtggtgggtggaggttggtgggaggaaggagggaaaaggaggaataggggaagaatttgggttgtgtttgtttgggtgagtgaggagaaggtgggtggaggagataggtagggaagagtgtggaaggtggttgtggttgtttgttgtgtgtggggttagggaagagggtgtgtgaggtggtggggagggtgtttgtttgaagggtaattggtagagggttgtgggtgttggtgtatggttttgggttgtttttgtgatagttggtgggtgggtaggaagaatggatgtgtttgagaagtggtggtgttttggaggtttgttttaagggggttggagtttggagagtgggtaagggtttaaggtaggaagtggttaaaggtgttttagggttgttatgggtgttgttttttggtgggtgggttaaaaggttggtttgttaggagtgggatttgaatttatgtttttaggggagattgtgatttgaatgtagtgttttagattgtttggttattttgatggtgtgttggggtgttttgttgttggtatggttgggatttggtgtgaatgtttgtgtttttggttggtgtttgtttgggtttggtgtgtaattgatggattgtgtggggggagtgggtgttaagtgaatggagttggttggtgttggtgtggatgtttttgtgtttttattttggatttaaagggtttgtgttgggttggttgttgttggtgtatgttttagtttttgtgtttttgtttgttgaattttgtagggtgtgtgtttattgtgttttaggagtagtggtttgattgttttgtttgtgtttttttttgttttggtgtgatttttgtgttggagatagtaggtagggtgtgtggggaggttttatgttgttttggtatttgttggggtttggttttggttttgggttttagtgggattgtagggtgttttgttgggtgttggggtaggttgtgttaatggtggtggggggtgggtggtaggtgatgggtggtgtgtggtgggtggtgggtggtgggtggtgggtggaaggtgagtatgtgtttggtttttgttgttgggggaggggattaaggtagggttaggtgtttgtggttggagtggggtttggtgttttggtgattgttgttgttgtttttgttagtatagtggtgagtatttttgtttgttatgtgggagattggggtttgattttttgatggggaggtagttgtgttttttgggttgttgttttggatttagtttgtgggtttttttttttttttttttgttttttagttagttgtagggtgttattttgggtttggtttgtttggttttttggttttttgggtttttttggttttttgttttttttttttgtttgtggtttggtagtggtagttgggaggttttttttggttttgtatggtgtttaatgagttgttggtttaaagtggttgttggaagaggttttttgtgatatatggggttttgtgtttggtgggaagtgtaggagtggggattttgttggtgttggttgttttttttttgggtatttgttggggaagggttttgggggtttgaggtggtgagtgagtgagagtgtttttagaggtaggtgggtgtaatgggttagttgtgttggttttgtattggtggggtgtggggtggtttttggagaggttgtggtagtgtggagttgtgggtgggtggatggattgggtgttggggttggtttgttttgggtgttggtggtgtgttggtgggagttttgggttggtgtggtggggttgtttgtgttgtgtggtgttggtggtatagtggtgagtatagttgttttttaagtagttgatttgggtttgatttttgtttaatgtattgggtggattttttgtggagattttgtgtgtggagtttgtgttgtagtttggtttgtggttgtgtgtttgtgtgttggggaaggaggtttg

SEQ ID NO: 426 - DNA, 2407 bp, Artificial Sequence
  Description of Artificial Sequence: Synthetic polynucleotide
taaggtttgggtatttttaggtagtagggataaggtgggttttttttttggttgttaaatttatgttaaagttgagtttagggattggagtttaagaaatttattgtttattttttagtttgattggggatttgtatgtatttttgttgtgttgttttgagttttttaattttttatattttttttttgttatgtatatgtttttatttaggtttgtaaaagttttagttttttttaggggtagggatttgtatgttggtttagggtttggtatgtggggatgttgaaatagggttaggtttggtttttagttgattgttagagttttaaggtttagtaattttttttataaaggttttgttaagaggtgaggaaataagagttgggagaggggtgtggaatggtgggtgggatgaatgattagttttgtgtttttggttagttgtgttgagttaggggtattgtggttgttgtgtggttggaaatttaggaatgggaaggtttggggtttgtttggttttggaggtagttggtgggttgtttttggtggtgttggagtggttagtggtagttgggtatgggtgattgggttgtttgggttgtttttagattgtgatttttgaaaaattttgtgggtggggtgtgtttgtgttgttttttgttggaaggtgtgagttagtgtgtttgattgtgggtgggggtggaaagaggtgtgttttaaagtggtaatagatggtttttttatttaataggattaaaaaatttgtttttatttggttgattgtggaagtagagtaggtgggtggttaatggggatatgatggggggtggagttgaggtttttgaagtggaagtgggttgttgttgaggtggtggtattttttttgaggagtttttttgggtggttgaagaaggagttttttttttggagtgtgttggtggtggtgtttgtggatttaattagttttaggttaggttgagttttgtgggaaagtagtggtaagttagggttttgtagatgtgaggtttaggtagttttgtggtttatagaggttttggtttgtgttttttgggggagttgtgttgtgtggtttgatttagttgaggttttgtagtttgggattttgagttagttttggttgtttgtattgttgtttgtgtgggtgtattgagtttggtttggtgtgggtaatagaagttaggaggtttgtgtttgggttttggtttattttggggggttgtggttatggggtttagtttttagtttaggaagggaaattgagattttgggaggggtaggaatgtttttaaggttatttggaaagttgggtaggatgtgttgttagggggaagatttgggtagggtttttgttttttgttgatgatgttttttttgtgtgtttgtgttgttgttttgttattgtggggtttgtgagtttgttggggtgtgtgggttgtgtggtggggttttttgtaggttgggaggatttgagtatgggtgtgggtttgattgtgggggtgttgaggttgtagtttaaaatttagtagggttttgatttttgggtgtgtttttgggttttggttggtggttggtggaatgtgtgattgtgaggtttgtggtttagttttgtattgtttgggttttttattgttttggtgtgtttatagataggtgtatgaagatttttatgatttgaaatagagttgttagtaaatattgtttttttgtttttgatttattggggaagagggaaaaggatagagtttgggtaagttgttttggtagggattttagtttttgttttttatttgttagtttttatagatgtttataaatttaataatttttgttttgtttttgtattaagtttttgagttagatgtagggttttagttttggagtttggtttagattgtttaattgattggggagattgaggtttagaaaagtgaagtggtttgtttaaggttatatagttagttatttggtagtagatgaggttaagttttatttgtaagatttgggttttgaatttattgattaggagttttgggattattgttaataaaagagatattgaagggaattttttgttatttttttggtgatttgttttttaatggataaggatatattgggtttagttttatttgtgagtttgaggtgaaatagaggtatttgagtagtaagatatattgttggtttttgtattgtttgaatttgagtttttaaaaattttattttaatatattgtttattgatttttttttgaattattatttttgtaaggattttttgtaaatattgtttttttaatttttatgaaattttaatgttatatgtaaattatttttttttatataatgtatgtatatttgtgttttgtatataaaatgagtaagattt

SEQ ID NO: 427 - DNA, 2407 bp, Artificial Sequence
  Description of Artificial Sequence: Synthetic polynucleotide
aaattttatttattttatgtataaagtatagatgtgtatatattatataaaaagaaatagtttatgtatggtattaagattttatgaagattagaaaaataatgtttataaaaggtttttataaaggtagtaatttaagaaaagattaataaatgatgtgttaaagtaagatttttggaagtttaaatttaggtaatataaaagttagtaatatattttgttatttgaatgtttttattttattttaaatttatagataaaattgaatttaatatgtttttgtttattaaaaagtaaattattaagaaagtaataaaagattttttttaatgttttttttattgatagtggttttaaaatttttggttaatgaatttaaaatttaaattttgtaggtaggatttaattttatttgttgttaaatagttggttatgtgattttgggtagattattttatttttttggattttagtttttttagttagttggatagtttaagttaggttttagagttgagattttatgtttggtttaagaatttggtgtagaaatagaatgaagattattaagtttgtgaatgtttatgggaattgataagtgaaagataaaagttgaaatttttattaaaatggtttgtttaagttttattttttttttttttttttgatggattaaaggtggaaaagtggtgtttattagtaattttgttttgggttgtgagaatttttatatatttgtttataggtgtgttagagtggtgaagggtttgagtggtgtagggttgggttgtaagttttatagttgtatgttttattaattattagttggggtttggaagtgtgtttggaaattgaggttttattaagttttagattgtgattttggtgtttttatggttaggtttgtatttgtatttagatttttttgatttataaaaggttttgttatgtggtttatgtattttggtaaatttgtaggttttatgatggtggggtggtggtgtgaatatataaaggaggtgttgttagtggggaataaaaattttgtttgggttttttttttaatagtatattttgtttgattttttaagtgattttgggggtgtttttgttttttttagagttttagtttttttttttaggttaggaattaagttttatggttgtggttttttagggtgagttgagatttagatgtagattttttaatttttgttgtttgtgttaagttgggtttggtgtgtttgtgtggatggtagtgtgagtgattagagttggtttgaggttttgggttgtaaagttttggttgggttaagttgtgtagtgtggtttttttaagaggtgtgggttgaggtttttgtaggttgtgaagttgtttaaattttgtatttgtaaggttttgatttattgttgtttttttgtaaagtttggtttaatttggagttagttaggtttgtaggtgttattgttggtgtattttggagaagaagttttttttttagttgtttaggagagttttttgagaaagatgttgttgttttaatagtaatttatttttgttttggaggttttggttttgttttttattatgtttttattggttgtttgtttattttatttttgtggttggttgggtaaggataaattttttaattttattggataagaaaattatttgttattattttaaaatgtgtttttttttgtttttgtttataattgagtgtattaatttgtattttttggtaagagatggtgtgggtgtgttttgtttgtaaggttttttgggagttatggtttgagggtgatttgggtgatttggttgtttgtgtttggttgttattgattgttttaatgttgttagggatgatttgttagttgtttttggagttgagtaggttttgaatttttttatttttagatttttagttgtataatagttgtggtgtttttggtttgatgtagttggttggaggtgtggagttggttgtttgttttgtttgttgttttgtgttttttttttggtttttgtttttttgttttttaatgaggtttttgtgaggaaggttgttgggttttgggattttgatgattggttggaaattaggtttggttttgttttagtatttttgtgtgttaagttttgggttggtgtgtgggtttttgtttttggaggaagttgggatttttgtaggtttgggtggagatgtgtatataatagaggaagagtgtggaggattggaggatttagggtagtatggtagaggtgtatgtaggtttttggttggattggagaatgggtggtgggttttttgagttttagtttttgagtttgattttgatgtgggtttagtaattaggaaaaaagtttattttgtttttgttgtttgagaatatttagatttta

SEQ ID NO: 428 - DNA, 2229 bp, Artificial Sequence
  Description of Artificial Sequence: Synthetic polynucleotide
tttttttttggtgttggttggtgtgggttggggttaggtggagaagttgttttttgttaaggtgatagaatgtgttgggggtgggggttggggttagggttggtgtaattagggggttgttgtttttttttggatatagtggaagttttttttgtattattaaatttttgttattttttttgagggatttgtttttaggtagtatgtaagttgttgttttgggtttattttgtatttttttattgggtgaggaaggagtattttgaatggagatgggggtgtttttggtttatatatttgtagagaagaggtgtgttgggttgtatttttggaggttgtggtaattgatattagagaagattttggttgtagttgggaaggtttattggttggaaagaggtgttttttttttttagtaaagggttttgtttggaagggttgttttttatttgtttagtggtattataggatggttggtttttatttgaatttttttggatggtattattatatagttgggtttttgtagtgttggttttttaatttgatgattgttattttggtgaggatttgtgttgatggttggagaattttgtgttgtgggtgtatatggttaggtggtgtttggtaggtgatgtttgggtgtaggatggtgtttttattgttttattttaaattgttgtttgggtttaggttttttggttttttgaataggggtttggggggttaaggatgttgaggttttgggggtaggaagttttttttggttaagtgtttttttttttttttggtatatatttttttatttatttattttgtttatttttggggtgagaggtttattaaggtagggtgtgttttttttatgaattattttaaggtttttgagttgtgggggttttgggtaattatttttttttttttttggttttaggtattttagtttaggggtttgtagagaagtttgaagtttggataaatgtgttggatgttaataattttttatttttggtagtagtaaaggttaatatatttttattttttattttagtttgttattaaaataaagttgtgtgtggttgagggtaggaaggtgttgagattgagaagaagggatgttttggagaaagtgtgtttagttgattttagaaattagagttttttgggattttgttgagattttttgtagggtgttttaatttgtttttttattgtgtgttggtgttgtagtgtgtgtggtttagggtttggtgattttggtttagtttggtggttgtggtgaggtttttggtgtagttgtttggaattttgtattagaattgggattgtgtaaatgttttggttgaagtgttattttatttaagaaatattgttgttaggaataaaatggggtttttggtgttttgaagtattttttgaaatttttttaaaataatttataaaaaatgtttttgttttaatgttttataatgtttaaggaaatatgtaaatggtttgtttttttattgagatggttgttttaattaatagtgtatatatatataataatttttttaatttttttttttagagttaagtattttattatatgtaaattataataaagaaaagattgtgtaagattatgtaagttgattgatttaaaatattgagttttaatttaggttttttgtttttttatttaataatttttgtgtttggattagattggtgaagtaggttatggaaattaataaagtaaaaaattaaaagtatttttttttgttatttttttttttaaaattaaataatagttgtttttttttgagtaggttttagttttaggtttgagtttttttgtgattattttatagttatttatagtagttgttgttgtttttgttgggtttttgtttttgttttttttgggttgttttttgtatataaaatatattttagttttttaattaaatttaaatatgattttggtagaatttatatattttgtggtgtatggattgtgttggtgtaggggaaataaatattttttggtatttaattattgagtttaatttgaaaaattgggattgggtttttaggtggtattttaggggttttaatttggtttgtgtttttttagattttggtgttgagagtgttgtttttgtgggtgggtggatggagaggtaataatttgtttttaataaaaatttgttgttattgaattgaaagtgaaagggaagggagaag

SEQ ID NO: 429 - DNA, 2229 bp, Artificial Sequence
  Description of Artificial Sequence: Synthetic polynucleotide
tttttttttttttttttgtttttgatttggtggtgataggtttttgttgaaagtagattgttatttttttgtttatttatttgtaaaagtagtgtttttagtgttaaggtttggggaggtgtgggttaggttggagtttttggggtgttgtttaggggtttagttttgattttttgaattagatttagtggttaaatattagagggtatttattttttttgtattgatataatttatgtattatgaaatgtgtaaattttgttggggttgtatttgaatttagttagagaattggggtgtgttttgtatataagagatgatttaaagaaggtagaaatgaaaatttgatagaagtagtaatagttgttgtgggtgattgtggggtgattgtaggaaaatttgagtttgggattgaagtttgtttaggaaggggtgattgttgtttaattttggagggagggatggtgaaggaagatgtttttaattttttattttgttaatttttatagtttgttttattagtttggtttaaatataaaagttgttaaatagaaaaatagagggtttggattaaaatttaatattttaagttaattgatttgtatgattttgtataattttttttttattataatttatatatagtgaagtgtttagttttgaggaggaaagttggaagaattgttatgtatgtgtatattgttagttaggatgattattttgataaagaaatagattatttatatgtttttttaaatgttgtaaaatgttaaagtaaaaatattttttgtaagttgttttaagaaaattttagaagatattttggagtattggggattttattttgtttttgatagtagtgttttttgaatagggtgatattttagttagggtatttgtgtggttttgattttaatgtgaagttttaagtggttgtgttaggaattttgttgtgattgttgggttaagttggagttattaagttttgagttgtatgtgttgtgatgttggtatgtagtaggaaaatagattaaaatgttttatagaaaattttggtgaagttttggaggattttggtttttaagattagttgggtgtattttttttgggatgttttttttttttggttttagtgtttttttgtttttagttgtgtgtagttttgttttggtggtaaattgaaataagaaatggaaatatattggtttttgttgttgttagggatgagaggttgttgatgtttggtgtgtttgtttgggttttgggtttttttgtagatttttggattggggtgtttgaggttaggagaggagggggatagttgtttggagtttttgtggtttagaggttttgggatgatttatggggggggtgtgttttgttttggtgagttttttgttttgagggtaggtgaggtgggtgggtaggggagtgtatgttggagagaagagagaatgtttaattagagagaattttttgtttttggagttttagtgtttttagttttttaaatttttgtttaggaagttgaaggatttaggtttaggtaatggtttggggtggggtggtaagagtgttgttttgtatttggatgttgtttgttaggtgttatttggttatgtgtgtttgtagtgtagggttttttggttattagtataggtttttattgaggtgatagttattggattgggaaattaatattgtgaggatttggttatgtgatgatattgtttgggggaatttgagtggaagttgattgttttgtggtgttattagataggtgagaagtagtttttttaaatagggttttttgttggaaggaggaggtatttttttttagttagtgagtttttttagttgtaattggggttttttttaatattagttattgtggtttttagaggtgtagtttggtatattttttttttgtagatgtataaattggggatatttttatttttatttaagatgttttttttttatttagtagaggggtgtggagtaaatttgggataataatttgtgtgttgtttggaagtaggttttttagaaaggatgataaaaatttggtgatgtggaagaagtttttattgtgtttaggaaagggtagtggttttttagttgtattggttttggttttggtttttatttttagtatgttttgttattttaataaagagtggtttttttatttgattttaatttgtattagttagtgttgaggaaaga

SEQ ID NO: 430 - DNA, 6887 bp, Artificial Sequence
  Description of Artificial Sequence: Synthetic polynucleotide
tgttgtttgtgggttgttggttggttgtagtttgttggtgatgagggtattatagttgttttgattgtgtagattatgtatgttttggttttgggaatttattatgtattagaatatattagtgtttgtattttaaaaggttaaattattggtttttagttagggatttttggtaagtggtttgttagtgatgagtgtttgtttatattggtatatagtggagttttttgtttttggtttatttgtttttaggaaagttttggggtgaggtgaaggtgattgaagtaatgtttttttttttagattgtagttgtttaggggggatatagtatggtattttttattgaattttttttgtttgtttgtattttagtttttttttttttagtgatttttttatttttttttttttttttttttttgatgtttgattttagtagtaaaggaggtaaaaaaggtattgagttgttagttaaatttgaaaagtgtggttttgttttttttatagttattggtagttttttgtggaaggtttgttttttggggtagttgtggttttggagtggttgtgtttggtgtttgttgggtgtggttttgttttaggtttgggagggtaggttggttgttttggtgagtggtagagtttttttggatagtttttgtttatttaaatagaagatgttggtgttggagtgggtttggatatggtgaggttgtgagttggtttgagtggtggggtttggtgatttttttttttttttttgttttttttttttttttgtatgtatgttttgtttgtttttattttgtttttattttgggtgagtttgtttgtagtttggggtgtatatttgtatgtgtatttttttttatttatttttgtgtttgtttttatttttgtagttgagttttgttatgtgtgttttgtttgtttgttggttgtttttgttgtttttgttgtttttgggttttgatggattgaatgaaggttgtttatattgtttattgatgttttattaaagatttagaaggttgtgttatgaatttggagttgataatggaaagtttgggtattttgtatgggttggttggtggtggtagtggtgggggtggtggtgggggtggtgggggtggtggtgggggtttgggttatgagtaggagttgttggttagttttagtttttattatgtgggttgtggtgttgttggtttgttgtggggttttttgttgtttttaattgtgtattaggagttgggtatggtggtagtggtggtagtggtggtgttgtgtttggttatggttattagtatggttttgattttggatggtggtgattattggtttgagttttttattttgttgtattatgttatgagtatgttttgtgatttgtttttgtttggtatgggtatgagtaatatttatattatgttgatattgttttagttgttgttatttatttttattgtgtttgataagttttattatttttatttgtattattatttgtattattattattattattattattagtgtttgtttggtaatgttagtggtagttttatttttatgtgtgatgagtgtgggtttttggttatgaataatttttatagtttttataaggagatgtttggtatgagttagagtttgtttttgttggttgttatgttgttgggtaatgggttaggtggtttttataatgtgtagtagagtttgtttaattatggtttgttgggttatgataaaatgtttagttttaattttgatgtgtattatattgttatgttgatttgtggtgagtaatatttgttttgtggtttgggtattttatttgtggttatgatgttgtatttgaatggtttgtattatttgggttatatttagttttatgggttggtgttggtatttagttgtgagtggttatttttgtttttattgggtttgtaggtggttatgttgggttagttggaagaaattaatattaaagaggtggtttagtgtattatagtggagttgaagtgttatagtattttttaggtgatttttgtgtagagggtgttgtgttggttttaggggattttttttgatttgttttggaatttaaaattgtggagtaaatttaaatttggtagggagattttttgtaggatgtggaagtggttttaggagtttgagttttagtgtatgtttgttttatgtttggtaggtaaggttggggttagttaggggttaggttgttgggaagagggttttgggtttggtgtttgtggtttaagtttgtgtgttgagttattttttttgatttttttttttttttttttatatatgttttttttttttttgtttttatttttttttttatttttttttttttttttgttttttttttatttttttttttttttttttttttttttttttattttttttttgtttttgagtttttattgattgatttttttttattttatttgttttttttttaatgtgttaatttttgttttatttttgatttttttaggtattgggaggtgggatgggggtgtgtgtttttttttaggagttttgtttttttaagatttatagaaattaggatttgtttttatttaaaattttatgtattttaagttttttttagataatatattttaattttttgggttgattagtttttttgtgtagaggtagttgagaggttttgttttgtagagggaaaagagttttttatttttttatttattatataggtaaatttatttggttattggttgaaggtatagttttgtttttgtggggaattggtggttaggatataatagtgtttttggagtttatttttggttttggtgttggtgtagggattttttgattgggtttgaggggtttgggttagttttaatgttattatttatagtgagggtagggtgtaaggttgagaaggttatatttattgttttgggaggatgtgggagaagagattgaggtggaaagtgttttgttttgtttattggttgtttttgttttggttttagtgtttgttgggatttgttaggatttgttggggttttgggagattttgagtatttgtaggaagaggtgttgagaaattaaaaatttaggttagttaatgtatttttgttgttggttgtaggttttgtttttgtattaagtgggtgttgattgtgtgtgtttggtgattgtggggaggattggtggtttgtgggaggggatgggtagaggtgtgggttatattgttttggagttggtttggttttttgtgttttttttagtggttaagttgtgaggtatagttttttattgttttaggagtatagaaattttttgtgtgggtggtgggtgtgtgagttagagggaaagatgtagtagttattgtgattggtatgtagttgtgtgtttttgtgtgtatggattttgtgtggtgtgtgtggtgattgtgttgtttttaggagtaagttatgggtttagaggggtaaaatgtttaggttttttgttgggaaggatatattatattttatggtaagttagggtgggtgattttttatggattgggtggaggggggtattttttaggattggtgggtggtttaggggaataatttgtggtggtgatgatttgtatagtgtgggttttgggatgtgtgtggttttgagttagttttgtatagtttgtttttggagttgtgagtttaggtttttatttttgattttttgggttttttttgtattgttgagtttagtttgtggggtgtatttgattaatgtttgatagggttggggaatgtgataggtagtaggtttatttgggtttggggagggggagtttttgttttgatagtatttttttttgttgtttgttggtggatttttatttttagttggtaattgttttgtagtgttgatttaagaaggtaaagaaaattaggtttttttgtaaagagttttttttaaattggtggattttggatattttgagtggatttagaaatttatgtaattttttttttttagtttattttttatttttttttatagttttttttgatttgttgttggtttggggtaagataaagtagttagtagagagtgataataatagtggtgggaaatgaattggagattggttgatagtttttaatattttgttatagatttttttgaatgttttaggttgtttttggtgggttttagtatttgttggttttttgggtattggggattagaaggaatttggtagttggttttaggggtatagttaaaggtaggatgatagttatttttttgtttattttagagtgttgttgtttttttatgttggttgtgtaaagaatatagtttttaaaaaatatgtgttttttgtttatataggtttgaaagtgatgaggaaagtaatgttttgtttattagtgagttttagtttttaaaatgattttaagtgttgttgagatgagaaagtgtggtattttgggggtttttagttttatttgtgtttatggtgtaagtttgtagggataggtttgggatagtattgtttatgttgttagattttttgtagaggattgttgaagttgtttttgtgggagatagaatgttttttttagtgagtggaaaaggtttgttgaggattttgttttgtttgagtatttaaatgtgtgtttgttttattattttgggttgaaaagggataagagttttagtttttttatttggttattttattagtaattataagtgtgttgagtggttattattatataggaggttttttagtttggggttagtagattagtttttttagatattgatgtagaagttgggattggtaagtaggtattatgtgtttggagtgttaggggataggagtaaatggagaagaaaagtggaggttttttttgtttggagtattgattggaatttttgttggtatgttgtagagggtttttgttgttgggttttgggggtttaataagtttagttgttttgtaggtggtttggttggatttttagattggtgtttggaagatattgtttttgttttttttttgttaaatttgtttttttttttttttttataggttataggtttttttttttttttattttggttttgtttttgggttttgttaaatagttaagtaggttggggtttagggggtttagaatgaagaggtttgatttggttagtgttggtaaagtttatttttaggtgaggttataatagaggtaggttttttttgtttagtttgttggtgtagttatagttaagggtggtatttgaaaggaaaagggagaaaattttggagaaatttagattgttttaatgttagattttagagaaattgattttaaatgtatggatttgtttggaaagggtggttaagtggtaggtggttgtaattttgtttggttgggtttttgtagaggttttttaagattagtttttgtagggtggtttttagtaatttgataagaggtggttaagataaatttttgtgggtttgagtatatatttttgggtgttgggttttagagatttttaaattaagtataaataagaagggagtgagagaatttaggttagaatttgtatgggtattttattgaggaaaagtgaggttttggtggtaggtatgtttttttttgatgtttgaaaattgagttgagtgtttgattatatttattgtagaggtttttgtttttagtgagtttggattttttagtggtttgtttggagttggtttttagtttttgttgtagtttgatgtatggtttttttttggtagtaagtttttagtggttagtttgaagttaattttgtttaggtggttgagggtttttagttaatttattatgatgttgtttgggttatttgatgtttgtagtggtgggatatggtttgggtagtgtgtagtggtttttgttaggggtattgtgtgtgtgtttgttttttgttgtgttggggatgtttttgggtgatatgggttgttgggtattttttaagttgaggaaatggattttttttgtagagttttgtgtttattttttaattttttattttgttttttgttgttagggtttttgatttagtttattttttttggtggtttagttagggattagagttggagaggttgaatgtaatttgtgttagtatggaatagatgatatgtttgtttgttagttgtttggatgaataattgaaaagtttgttgtagtttgtgttttgttaagttttgggtgttgggagaatatttttttaatatgtattagggtgggtgggagtgggtagaggaggtgggatttgagggaggagagtgaatttgagtaggagaagtagtttaggtagttaggtgtttttgatgtgagaggttgggtatttatttttattttaggttttttattgtgtggttatgttatttttttaaataaatgtgtatatggagggagattgatgttgataatgtttagaagattaaaagagtattaatgttggtaataataatgtaaatgtgtggatttagattttattgatttggaatttgatttggtgtgtttttagtaagtttgatggtgtgttttttttagtagagtgtttattagtgttatggttttgtggttttttagtggtgttgttttgttagttttgtgtgggtttttttgtttgattgtagttttttttttgtgaggttttagtttgttttatttttttgaggtttttttttttttttgtggggttttttgttttttgtatttttttttttgatttttgtattatttgtttttgtgtgtatatattgttatttgtgtttttggtgatttgtttgggtggttgggtttgtgaagttaatgtgttgaatggtgtttg

SEQ ID NO: 431 - DNA, 6887 bp, Artificial Sequence
  Description of Artificial Sequence: Synthetic polynucleotide
tgggtattgtttagtgtattggttttgtggatttagttgtttaggtggattgttggaagtgtaagtagtggtgtgtgtgtataggggtgggtggtgtagaggttgggggagggggtgtagagggtagagagttttgtgagaggaggagaaaattttggggaagtaaggtgggttggggttttgtgggggaggagttgtggttagatgggagaatttgtgtagagttggtgaagtggtattgttggaaaattgtggggttgtggtgttggtgagtgttttgttgggaagagtgtgttgttgggtttattggaaatgtgttggattaagttttagattaatgaaatttgggtttatatgtttatgttattgttgttagtattaatgtttttttaattttttaaatattattagtattgatttttttttatatatatatttgtttgagaaagtgatataattatatagtggaaagtttggaataaaaataaatgtttagttttttgtattgagggtgtttggttgtttgggttgttttttttgtttgggtttattttttttttttgggttttgttttttttgtttgtttttgtttattttgatgtgtgttgggaaggtgtttttttggtatttgggatttgatgaagtatagattgtagtgaattttttaattatttatttaagtagttagtaggtaaatatattgtttgttttgtattggtatgggttgtgtttagtttttttagttttgatttttaattaaattgttaggagaggtgggttgagttgggagttttagtagtgagaaatgaggtgggaggttggggggtgggtgtgagattttgtgaagggggtttgtttttttggtttgggaggtgtttagtggtttgtgttatttaaggatgtttttggtgtagtgggagataagtatgtatgtggtgtttttagtaggagttattgtgtattgtttgggttgtgttttgttgttgtgggtattaggtggtttaggtgatattatggtgggttggttaagggtttttggttgtttgaatagaattggttttagattggttgttgggagtttgttgttaggagagggttgtgtgttggattatggtggggattggagattagttttgggtaggttgttgggggatttgggtttattggaggtggaaatttttgtagtaaatgtagttgggtgtttggtttgatttttgggtgttggaagaaaatatgtttgttattgaggttttgtttttttttagtgggatgtttgtgtaagttttagtttgggtttttttattttttttttgtttgtgtttggtttagaggtttttggggtttaatgtttgagagtgtgtgtttgaatttgtagaaatttgttttggttgttttttgttaggttgttgaaaattgttttgtaagggttggttttggggaatttttgtgaaggtttgattgggtggggttgtaattatttgttatttagttgttttttttgaatgaatttgtgtatttggagttaatttttttgaaatttaatgttggggtaatttaaatttttttgaagtttttttttttttttttttaagtgttatttttggttgtgattatattggtaggttgggtaggaaggatttgtttttgttgtgattttgtttaagggtgagttttgttggtgttggttaaattagatttttttattttgagttttttaaattttggtttgtttggttgtttggtaggatttgggggtggggttaaaatgagagagaaagggaatttataatttatgagagaaagagaagaggtaggtttggtgggaggggggtagggatggtgttttttaggtattggtttgagagtttggttgagttgtttgtggagtggttgggtttgttaaatttttggggtttaatggtgagggttttttgtggtgtattggtggggattttgattgatattttgggtggagaaagtttttgttttttttttttatttgtttttgttttttagtgttttgagtatataatatttatttattagttttagtttttgtattagtgtttgaagagattgatttattgattttaaattgaaaagttttttatgtaataataattatttaatatatttgtagttgttgataaaatggttagataaaaaggttaaagtttttgtttttttttaatttagggtaataaaatagatatatatttgaatgtttgagtaaagtggggtttttagtaggttttttttatttgttggaggaggtattttgttttttatgaaggtagttttagtgattttttgtggaaaatttagtagtgtgggtagtgttgttttgggtttgtttttgtagatttgtattatgggtgtgggtggggttgaggatttttgggatgttatgtttttttattttagtaatgtttgggattattttaaaagttgaaatttgttaataggtgaagtattattttttttattatttttagatttatatgggtagaaggtatgtgttttttaaaagttgtgttttttgtgtgattggtatgagggggtggtagtgttttgagatgagtaggagaatagttgttattttgtttttaattgtatttttaagattagttgttaagttttttttggtttttggtgtttaagaagttggtgggtattaaaatttattagagatagtttgggatatttggggggatttatgataaaatgttaagaattgttagttagtttttagtttattttttgttgttattattattgttttttattggttgttttattttgttttgaattaatagtaaattagagaaaattgtaggagaggatgaaaaataaattaaaggagaaagattatataaatttttaaatttatttaaagtatttggagtttgttgatttgggggaggttttttgtagggaaatttagttttttttatttttttagattaatattgtggggtgattattgattgggaataggaatttattagtagatggtaaaggaaaatgttgttaaagtggaaattttttttttttaagtttgggtgaatttgttgtttgttatattttttagttttgttgggtgttggttgagtgtattttataagttgggtttagtggtgtgaggaaagtttgggggattgggggtggaaatttgagtttgtagttttggaagtgagttgtgtgaggttggtttggaattgtgtgtattttaagatttgtgttatgtaaattattgttattatgaattgtttttttagattgtttgttgattttgaaagatatttttttttatttgatttatgggaagttgtttattttggtttgttatagggtatagtgtgttttttttagtgggggatttggatattttgtttttttgggtttgtggtttgtttttaggggtagtgtagttgttatgtatattgtgtggggtttgtgtgtataaaagtgtgtaattgtgtgttagttgtagtaattattgtatttttttttttagtttgtgtatttgttgtttatataggaggtttttgtgtttttagaataatagagggttgtattttgtagtttggttgttagaggaggtataaagagttgagttggttttagaataatgtaatttgtgtttttatttgtttttttttgtgggttgttagttttttttgtggttgttaggtgtgtataattagtgtttgtttaatgtaaaggtggagtttgtagttggtggtagggatgtattaattaatttgaatttttaattttttagtatttttttttgtgagtgtttagggttttttggagttttggtaaattttggtaaattttagtaaatgttgggattggggtaaggatggttggtgagtaaggtaaagtgttttttattttagtttttttttttatgtttttttaaagtggtgaatgtgatttttttaattttatattttgtttttgttgtaggtagtgatattggagttggtttgagttttttaagtttggttagaaagtttttgtgttaatgttaaggttagagatgggttttaggagtgttgttgtattttggttgttggttttttgtgggggtaaggttgtgtttttagttaatgattaaataagtttgtttatatggtgggtgggagagtagagagtttttttttttttgtagagtaaagttttttaattgtttttgtatagggagattagttagtttggaaaattgaaatgtgttgtttaaaagagatttgaagtgtatggggttttgaataagggtaggttttggtttttgtgggttttggaaagatagggtttttagaggaaaatgtatatttttattttgttttttagtatttgggaagattggaaatagggtaaaggttggtatattgaggggagggtgaatgaaatgggggggggttggttaatgaaagtttagggataaggagagagtaagaaagaaaaagaaaagggagaagggaaagtaggggaagagtggaagagaaagagaaaatggaagaagaaataaaaatgagaagaaagaggatgtgtataggaaagagaaggaaagaattaagagaagtgatttggtgtgtagatttgggttataagtattggatttggagttttttttttagtagtttggtttttggttagttttggttttatttgttaggtgtaaggtggatatgtgttggaatttgggtttttgaagttatttttatattttgtggaaggtttttttgttagatttgagtttattttatggttttggattttggagtaggttggagagagttttttgagattggtatagtattttttgtgtaaagattgtttgggggatattgtagtgttttagttttgttgtgatgtgttgggttatttttttggtgttgattttttttagttggtttgatgtggttatttgtgagtttgatgaggatgagggtggttgtttgtgattgggtgttagtattggtttgtgagattgagtgtggtttgggtggtgtaggttgtttaggtgtgatattatggttgtaggtggggtgtttaggttgtgggataggtgttgtttattgtgggttagtatggtagtgtggtgtgtgttgaagttggggttgagtattttgttgtggtttggtggattgtagttgggtagattttgttgtgtgttgtggaggttgtttagtttgttgtttagtggtgtggtggttagtggggataggttttggtttatgttgggtatttttttgtagggattgtagaggttgtttatggttgggagtttgtgtttgttgtgtatgagggtgaagttgttgttgatgttgttggataggtgttggtggtggtggtggtggtggtggtgtggatggtggtgtgggtgagggtggtggaatttgttagatatggtggagatgggtggtagtggttggagtggtgttagtgtggtgtaggtgttgtttatgtttatgttaggtggagatgagttgtaggatatgtttatggtgtggtgtagtgggatggagagtttgggttggtagttgttgttgtttaggattgaggttatgttggtgattatggttgagtgtgatgttgttgttgttgttgttgttgttgtgtttagtttttggtgtgtggttggaggtggtggagggttttgtagtgagttagtggtgttgtggtttgtgtggtgggggttggggttggttagtagtttttgtttatggtttgggtttttgttgttgtttttgttgtttttgttgttgtttttgttattgttgttgttggttggtttgtgtaaagtgtttagattttttattgttagttttgggtttatggtgtagttttttaggtttttggtgaggtattgataggtggtgtaggtagtttttatttagtttattagggtttgggggtggtgggggtggtgggggtggttggtgggtgggtaaggtgtgtgtggtggggtttggttgtgggagtgggggtgggtgtgggagtgagtggagaggagtgtgtgtgtgggtgtgtgttttgggttgtgggtgggtttgtttggggtgggggtggggtgggggtggatggggtgtgtgtgtgggagaggggaggggatggggagggagggagggattattgggttttgttgtttgggttggtttgtagttttgttatgtttgagtttgttttggtgttgatgttttttgtttgggtgagtgggagttgtttagaagggttttgttgtttgttggggtagttaatttatttttttggatttggggtggggttatgtttgatgggtgttaagtgtaattattttgaggttgtagttgttttgggaggtgggttttttatgggaagttattagtggttgtggagggggtggggttgtattttttaggtttggttgatggtttggtgttttttttattttttttgttattggaattaaatgttaaggagagggagggaggagaaggtgggggggttgttggggagagggaggttggagtgtgagtgagtgagagagatttggtgaaagatgttgtgttgtgttttttttgagtagttgtgatttgggggaaggggtattgttttaattgtttttgttttattttaaagtttttttggaggtgagtaagttgggagtaaaagattttgttatgtgttagtatagataaatatttgttattaataagttatttattgagagtttttagttgggagttaatagtttagttttttaaaatgtaggtgttaatgtattttaatgtatggtaaatttttgaggttgggatatgtataatttatgtggttagagtaattgtagtgtttttgttgttagtgagttgtggttggttggtggtttatgggtggtg

SEQ ID NO: 432 - DNA, 3952 bp, Artificial Sequence
  Description of Artificial Sequence: Synthetic polynucleotide
ggttgtagttggagaggaataggaattgtagtggggatgttttggtttttgggtttatagtatttgggatggatgtgtagtagtgtgggttgggaattgggtattagggtgggatgggtgagaggttttaagggataaggtagggagaagtgtagtggggtgtggggaattgtatgttttttttttgtttttgttttttattttgaggtggtagggtgggtgggtgtggttttgggggtgggtgggttgggtggggtggaggtggggttgtagtattggttttatttagttttttttgtttgtagttagagtgagttgagttgtggttagttttggtgggtagggggggtgttggagtgtagtgtagtgtagttttattagtttgtaaagtggattgagttggaagttgagtgttgttgtgggaggtgggtgatgggggtaggtgttattggttgtgttatggatgggttgtgtttgttgttgttgttgtttttgggggtgagtgttagttggagggggtttgtttttttttttgggattagaattttgagaagagttgggtgttgttattaaggaaatagaatagagtattggggttttagatattgagggtgggtggtgggaaaggatttttgatgttgggattatgaaggagggtttagggtttttggagtgtagaggtgattttttagggtggagatgagggtaagattggagtatggatgttggtttttaggtattgtagggggtggtgggggagttgggaggggttttttaagagggggtatggggttttttgatgtttaggttttttggaagaggatatttgaatgttgggattttgaagggattttttttttagtattttggtttttggagagttgtgggatagaattaaggtgagagaaggagggggaattggatggggattagagatgagaggggtgagttgggttggggtggggagtttgggatgatgggatggaataatggaggaggttggagggattggaggtagaggggatttggtaaggataatggggattggttagataatgggggggaggggtgttggagggagaggttggggagtgggagagaggttgagaagtgggttagggagggtagaagaggggtgatggtgagggtggtagagagatggaagtagaaggaaaggagatagagtggggtgtggattttgaagtggttggggttttgtttgtttgttgagggatagtgagatgagaagagagagtagaggtttggatatttttagtgtttgtttttgtgtttttgtttgtggttttttttagttttggaattggggttgtggatttaaggttgggaggggagtgtttattttgttggggtgaatttgtttttggggtttttttatggttggtgggtttttttgatgtgtgtgtttttatggtttgaagtagtgtagtggattgtgagggatggagtgggtgtgtttttatttgggttggtggtggttatgttttggggtgtagagtgttggggtgtattaggtggggattttttttggttgtgtgtagttttggttatgtaggtgggaggtggtaggtagggggtgttgtggggtgaggtaagtgtagtttgttgttgtttgtttgtgagtttggggttgtgtgttgttttttatttagttgtgtgatttgagtgttgtgtttattgtgttttgtgggtttttgtgttttgaagggttgggatttggtttgagttttttttggtttttggtgtaagttgttgggtatttaatgagatgggggtgtttggatgttttggattttgtagtgtggtattttgggttattgatttggtaaaggttggtgggttttttgggtggtttgatgagattgttagatgtggtttgttttatggttatgaattgaatgttttggaaggtttggtaatggaggaggtgtttttattttttttgttagtattttttattagagtattgtgttttaaattttggttttatagatatggagattgaggttttgagagtttaaatgatttggttaagattttatagtaagttgggttagagttgtggttagattttttgatttgatttttagtttggtatttttttatttttttagggggtagttgttgttttagtttggggttatggttgtgttttttagtagggtggggggggttgatattgtttttagagtttgttggtggtagagtttgtgggtgaggtgggtagagattttgtttgggtgtgggttttagtttgaaagtttagttttagttttttggagttgttaggatttgtggttgtgtttggggatttgggagtgattgtgggtatgtttgttgattaatgttgttggttagagatgttgtttagatgtgggtgggtgagtgtagattaggagagtggggaggagggattggattttagaggggtaatgatttgggttttgggtttgggtaagagtgagggtttttgtgtgaagatttaaggaaggaggggagttgggtgtggaggatttgggtgtttgggaaggtgtattttgataggaatttgttgtttgtagtttttgtggtttttgtttttgttttggtgtgtggttgtttggtttgggatggttgtgtgtggtttgagtttttttttgggttgtggtgagagagagagggttgaaattagagtgtgttttggtgggttggttggtgggttgtgttggtaatggaggtattttgttatttagatgtttgtaattagagttgttgggttggttaatgtgtttaatagggatggaatgagggtagtaaatgggtgtgtgtgagtggttgggttgagttgggtggatggtggatggggaggtagttttgtgggggatgggtttttattgtattgttttagtttagtttggtttaagtgttttgttttttttttgggggattgtgtggggaggtgggaataattgatgtgttgagtttttattaagtgttttgtatttttttggtagttttttttgaattatttaatttttataaggttttagtaaggtgaatttagttatttttattttgtagttgaggaaatagaattttttagatttttaggtttgagattaggtttttttagtgagttagtggtggtgtttttgttggaatttaggatgtttggtttgggatgtttttttttttatatatgttaggtttttttttgttttttattttttagattatggaaggagttgtggttttgagagattaaattgtgttttatgtttttggttttatatatttagatttgagttttttttttatatgtagaggttttgtttttttttaagtttttatgttatattattttgggtaattagtttttttttttttaattttttttttatttaaagggagtgaggggtatgtgttagtgttttttttgggtttgtattgattttaaaaggttttttaggtgtttgaaaattttttttattttatggtggtgattatggttttatttatttaagagttttttgttgaagttgttggaatggttagggttgattatattgaaatatttgtatggttttaaatatttttaattgttttgttgttttttttttttttttaattaaaaaaaatgaaaatttttaaaagttaatttatttaaggatttttttattttagttttttgtaagttttgaaatggttaaaataaaaagattataagtgtttttaaaaatgagatgaaattattttgttaaatgtgaaatgattaagtgtaatatatataaattttagggaaatttatttgttatttttataaattaatttttttggatttgattttggagtaattagtttgaatgttagttatttttttttatttggttaaattttttttttttgtttggggtttttttaagatgagatgtttttttgataattaatatttatt

SEQ ID NO: 433 - DNA, 3952 bp, Artificial Sequence
  Description of Artificial Sequence: Synthetic polynucleotide
aataaatgttagttattaaagaagtattttattttaaggagattttaggtaggaggggagagtttagttaagtagggaggggtgattaatatttaggttaattgttttaaaattagatttaaaaggattaatttatagggatgatagataaatttttttgaaatttgtatgtgttatatttagttattttatatttgatagaatgattttattttatttttaagaatgtttgtaatttttttgttttggttattttaaggtttataaggaattaaggtggaaggatttttagatgaattgatttttaagaatttttattttttttaattagagaaaagagagaaatagtgaaatagttgaaagtatttgaaattatatgaatgttttagtataattagttttggttattttaatagttttagtaaagagtttttaagtgaatggggttgtggttattgttatgggatgggagagatttttaaatatttggagggttttttgaggttgatgtaaatttaggggaggtattggtatatattttttattttttttggataggggaggagttgggaggaaaggagttaattatttaagataatgtagtatagagatttgagagggggtagggtttttgtgtgtggagaaggggtttagatttaaatgtgtggggttaaaggtatagggtatgatttaattttttagagttatgattttttttatgatttagaaggtagggggtgggagggagtttggtatatgtaggaaagagaatattttaggttaagtattttgggttttaataaagatgttattattgatttattgggggagtttggttttgggtttgaaagtttagaaggttttgtttttttaattgtgaagtgggaataattaaatttattttgttaggattttataaggattaaataatttaagagaaattattagggaagtgtaaggtatttagtaggaatttagtatattgattatttttgtttttttatgtggttttttagggaagaagtgaggtgtttgagttagattgggttggaatagtgtggtaggggtttgttttttgtggagttgtttttttatttattatttatttagtttagtttggttgtttatgtatgtttatttgttgtttttgttttatttttattaggtgtattagttagtttggtggttttggttatagatgtttgaatgataaagtgtttttattattggtgtggtttgttagttgatttgttgggatgtgttttggttttagtttttttttttttattgtggtttaggaagaaatttggattgtgtatagttattttagattgagtagttgtgtgttgaggtggaggtgggagttgtaggggttgtagatggtaggtttttgttggggtatatttttttaagtgtttaggttttttatgtttagtttttttttttttttgggtttttgtgtggggatttttgtttttgtttagatttggagtttaagttgttgtttttttgggatttggttttttttttttgtttttttggtttatgtttgtttatttgtgtttgagtagtgtttttaattagtggtgttagttagtagatgtgtttgtggttgtttttaaatttttggatgtagttataggttttgatagttttagggaattggggttgagtttttgggttggggtttgtatttggatagaatttttgtttattttatttgtaggttttattgttgatggattttggggatagtgttaattttttttgttttgttgggaaatgtagttgtgattttgagttgggatagtggttgttttttgaaaaggtgggggagtattgagttgggaattaggttggggagtttagttatgattttggtttaatttgttgtgagattttggttaagttgtttaaatttttagagttttagtttttgtatttgtaaagttggaatttggggtgtagtgttttgatgaaagatgttggtggggagagtgaagatgttttttttgttgttagattttttagggtatttggtttatggttataaagtaggttatatttgataattttgttggattatttggaggatttgttgatttttgttgagttggtggtttgggatattgtgttatagaatttgaggtgtttgggtgtttttgttttgttaggtgtttagtggtttgtattgagagttaggagaggtttagattggattttgattttttgaggtgtgggagtttatggagtgtggtgggtgtggtgtttgggttgtgtagttaggtggggagtggtgtgtagttttagatttgtaggtaggtagtggtggattgtatttgttttgttttgtagtgttttttgtttgttgttttttgtttgtgtagttagagttgtgtgtggttaggaagggtttttgtttagtgtgttttggtgttttgtattttgagatgtagttattgttagtttgggtaggggtatatttgttttgttttttgtgatttgttgtgttgttttaagttgtgagaatatgtgtgttggaggagtttgttggttgtgggggaattttgggagtgggtttgttttggtgaagtgggtattttttttttagttttagatttgtagttttaattttgggattgggagaggttgtgagtaggagtgtggggataggtgttggaaatgtttaagtttttgttttttttttttgttttattgttttttagtgggtaggtgggattttgattattttagggtttgtgttttgttttgttttttttttttttgtttttatttttttgttgtttttgttgttgttttttttttgttttttttaatttattttttaattttttttttgttttttaatttttttttttgatgttttttttttttattgtttggttggtttttattgtttttgttgggttttttttgtttttagtttttttgattttttttattgttttattttgttgttttgggttttttgttttagtttagtttgttttttttatttttagtttttgtttagtttttttttttttttttgttttggttttgttttatgattttttagagattgagatgttgaggggaaagtttttttgggattttggtatttgagtgtttttttttgaagaatttgggtattggagagttttatgtttttttttgaaagattttttttagtttttttattgttttttgtggtatttgaggattggtatttgtgttttggttttgtttttatttttattttggagagttgtttttgtgttttgggaattttagatttttttttgtggttttggtattagaggtttttttttattatttatttttagtatttgggattttaatgttttgttttgtttttttggtggtggtgtttggttttttttggagttttgattttgggaaagggagtgggttttttttggttaatatttatttttagaagtagtaatagtagtaggtgtggtttgtttatggtgtggttggtggtatttgtttttattgtttgttttttgtggtagtgtttgatttttagtttggtttgttttgtggattgatggggttgtgttgtgttgtgttttagtgttttttttgtttgttggagttggttgtggtttggtttgttttggttgtgggtgggagaggttgggtgaagttagtgttgtggttttgtttttgttttgtttagtttgtttatttttggaattgtgtttgtttgttttgttgttttggggtgggaagtagaggtaaagggagggtgtgtggttttttgtattttgttgtgtttttttttgttttgttttttagagttttttatttattttgttttggtatttagtttttggtttgtgttattgtgtgtttgttttggatgttgtgggtttggggattagggtgtttttattgtggtttttgtttttttttggttgtggtt

SEQ ID NO: 434 - DNA, 2820 bp, Artificial Sequence
  Description of Artificial Sequence: Synthetic polynucleotide
tttaggggataatatttaggtatgttaatggagtttaaaatgttaaggaaattatattataattttgtttagtatattataggttgttaaattgaaatgttatgttagttaggagtgtagtaatttttattttttggttttatttaattaggaagttttagtagagtgaagtttgttaagtgtttgttgttagaatttgaaggaatttgagtgagtaagaagagtgtttgatttattttatagaagtttgtttagaaatggaggagttagtgtttattgaagttggttttgtttttggtttgtttatatggagtttgattagttttagttatgtttattttggtttgggagatttgtaaagtgtttttttttttaatttttttgtattattttgaagtttagggaagtaaagagaggggtatatttggattgtaaaattaatgttttttgttgtttaggagagaagggaatgagagagagagagagatagatagatagagagagagagagagagagagagagagagagagagagagagagagaaattttattgaaatttagtttttttagaatttgtgtgatttggtttttaatgggagattagtgtgattttatggtatttttgttaggaattagtgatttttttgtagttattatttgatttattgtttttttgtttatttttttttataaagttattttttttttattttagtaagatttttttttttaatgatgataaagtttttgttttagtgttttttttaggattggtgtttttttaaaatagtgaatttagaaaattattttgtttaatattttttaaaatttttgtagttttaatgtaagtgtaagtatgtaaaggttttttgttatatttgtattttttgtttattttagaattattttttatttttgggtttgtaatagttttttttgtttttttggatagaggtgggtggtattaggggtttagggtagtaggaggtgaggggttgaggaggttgttagggtaggttggtttgtgttggatatgtgtgtttttttgtggagttaaagggttggggatgggggttttggatttattagagtaattttagttggtgggtgtttggtagttatttaaggaggtagggaaagtagtgagttttattgggtgggttatgatgagtagtatgatgggtagtagtagtagttagtaaaagtttttgtaaagtgtttagttgttgtattgttgtggggatttttatagtattatgattagtttgtgtaattttgtagtagtaaatggtttttgaggaatataggattgtgggggttgggtagtgggttattgagtattttgtggatggtggtagtagaggtggtggtggtggtagtggtatttggtggggaagtagtagttaaatttgtgtatgattttgagagttttagtaatatttagggattgggtttagttttggagtgagagggttgtttgttgagaagttgtgttggagatgtgggaagttgttgttataaggagggagttttgggaagttggaggataggaggagatgggagtttaggggtagatgagtggagtttgaggaggtagggtggagggagagttaaggtgttttgtagtttggtagttgttttttgagttttgttgtttgtatttttttggtgtttgggaagtagtaggtttttagtttgtttggggttatgtgggaagaggtagttgggttttgattggtggagtaggatgtaggttttgggagggaggggttgatgaggaggtgtaaggatgtaaggaggaggtggttgtggaagttatagatgggtttgtttgttaggtgttggtttgagtggggttaggtggggatggtttaaatgagaagtttgggttttagggtgggttatttgtatatttatatattatttgttttattttttgttttaggatgttttttattgaaggtggggtttggattagtgttttttttttgtgtgtgattttgggttgtgagtgtgggttgtggttgggtggtgtttttttgagttggagatggtgggggtggaggtgttagaggagtagtagtagtagggtagagaggggtgagttggtgtgggagagggtgttttgttggtgattggtgttttagtgtgtgggagtgtgttgtttaggttgtagggggatgtaggttgggaatgttgtggtggagaggttagggatgtttttttagggatttataggaaagagggtgagaggtgatggtgttagaattgtttttgttgatttggaagtaatagtagtattttttataagagtgtgtaattttaaggttgtttgttgaggtagtttagttattttggtaggtgttttttttttttttttttttttttttttttttttttaggttttttgtagttttgatttagtttaagtgtttgtaggtttgaatttttttttttattatttgtttttttttagtttgtagtttattagtgtgtttatttgggaggtgtggttagatgtgtttggaaggttagattggttgggataagtggtttgagagaaagagaaaggtttttttgtatatgttgtgggtgggttgttgggagtattggttgggtagtggtgtttgggaaggggagagtgggttttatttgttggtttaggtagtgattttgtgttttttatttgggtttttgttggatggttggtgatttggggtgatgagagaaggtttaatttggtaggagtttttggttttgtgtgttttttttattttttttagtgggaagggtaaatggtatagtgggatttgttttttg

SEQ ID NO: 435 - DNA, 2820 bp, Artificial Sequence
  Description of Artificial Sequence: Synthetic polynucleotide
tggaaggtgggttttgttatgttgtttgttttttttgttggagagaatgaaagaaatgtgtagagttagagatttttgttgagttagatttttttttgttgttttaggttattggttatttggtaaagatttgagtaaggaatgtagggttattgtttgggttaataaatggagtttgtttttttttttttggatgttgttgtttggttgatgtttttggtaatttatttgtggtgtatgtagaggagttttttttttttttttagattatttgttttgattaatttgattttttaaatatatttgattgtattttttaggtggatatattaataggttatgggttggagaggagtgggtgatgaggagagggatttaaatttgtgaatgtttgggttgggttggagttgtggggggtttgggaggagagaggggagaagagagaaggaaggagagtgtttgttgggatggttgagttgttttggtgagtagttttggggttgtatgtttttgtgggagatgttgttgttgtttttaggttggtaagagtggttttaatattattgttttttatttttttttttgtaaatttttagagaaatgtttttggtttttttgttgtgatatttttagtttgtatttttttatagtttaggtggtgtgtttttgtatgttggagtgttggttgttagtaggatgtttttttttgtgttgatttgtttttttttgttttgttgttgttgtttttttgatatttttgtttttattatttttagtttggagagatgttatttagttgtggtttgtatttgtggtttggggttatgtgtggaagaggggtgttagtttggattttgtttttggtagggggtgttttggagtggagagtgaggtgaatggtatatgagtgtgtgggtagtttattttgaagtttgagttttttatttgagttatttttgtttagttttatttgggttagtgtttggtgagtgagtttatttgtggtttttgtggttgttttttttttgtatttttgtatttttttgttgattttttttttttgggatttgtattttgttttattaattagagtttgattgtttttttttatgtgattttgggtgggttgaggatttgttgttttttaaatgttagagggatgtgggtggtagagtttgagaggtggttgttgggttgtggggtgttttgattttttttttattttgtttttttgggttttatttgtttgtttttggatttttgtttttttttgttttttggttttttagagttttttttttatggtagtagttttttgtgtttttggtgtagttttttagtggatgatttttttgttttggggttgagtttagtttttggatgttgttgaaatttttgagattatgtgtgggtttggttgttgtttttttgttgggtgttattgttattgttgttgtttttgttgttgttgtttgtgggatgtttagtagtttgttgtttggtttttgtgattttgtgttttttggaagttgtttgttgttgtagagttgtatgaattagttatggtgttgtgggagtttttgtggtagtgtagtagttggatattttgtgagggtttttgttggttgttgttgttgtttgttatgttatttattgtagtttgtttggtgaagtttgttgttttttttatttttttaagtgattgttaaatgtttattggttggaattgttttggtaagtttagaatttttgtttttgattttttaattttgtagaagaatatgtgtatttagtatagattagtttattttagtggtttttttagttttttattttttattgttttagatttttaatattatttatttttatttagagaaataaggggaattgttgtaggtttgggggtgaggggtggttttgggatgggtagaaagtgtaggtgtagtaggaaatttttgtatgtttgtgtttatattggagttgtgaggattttgagaaatattaaatgggatggttttttgggtttattgttttgaaagagtattaattttaggggaaatattgaaatagaagttttgttattattaaagaaaaaagttttattaggatgaggaagaaataattttatgagaaagaatgagtgagaaagtaataaattaaatggtgattgtaggggaattgttgatttttggtaaaggtgttatgaggttgtattggttttttgttgaagattaggttatatagattttagaggagttgggttttaatagaatttttttttttttttttttttttttttttttttttttttttttttttttatttatttattttttttttttttttattttttttttttttaggtggtaaaagatattggttttgtagtttagatatgtttttttttttgtttttttaagttttaaggtagtataggggagttgagaaaaagaatattttgtgggttttttaggttggagtgggtatgattgaggttggttaggttttatgtaggtgagttgagggtggaattgattttagtgggtgttgatttttttatttttggataggtttttgtggagtgggttaggtattttttttgtttgtttgggtttttttagattttgatggtgaatgtttggtaggttttgttttgttgaagttttttaattaaatagggttagaggatgggagttgttgtatttttagttggtatagtattttggtttgatagtttgtagtatattgggtagaattgtggtgtaatttttttggtattttaaattttgttaatatgtttgggtattgttttttagg

SEQ ID NO: 436 - DNA, 2265 bp, Artificial Sequence
  Description of Artificial Sequence: Synthetic polynucleotide
tatttttatttagtgtgtttagggtatttgtattgtgttagtttgtggtggtttttaaattaattttgattgagtttttgaggtagttttttatttttatttgtattaatttagtatgtttattaaaatttttaagtaattttttttttgttatgtaaatgttaggagttgtttgatttttttttttttttatttttattttttttttagtttagttggttttttggttgggtaagttgggaatttagtgattgaagggttttggaaggtgttggaggggagagatgttagtttgaatttttatagggtttttttattaaaaatttttaaaatgttggtttgagaaattttttttgttggagggtttgagttttatttttttttgttgtgtgtgtttttattgttgtgaattgttgtgatttttaatttattattttattttgtgtttttagtgttttagttgttttgtatttgtttagttttttttttgtttatgtatttggttggttggtggtgtttgggatgtggttgtaggtgttgttgtattggtggtaggagttagtgtagttatagttggtataagttttggttgggtagtttttggtggagttgtttatgttgtgatattgatattggtaggggttgagagttttgttataggaagttgaggtaggagagtagtagttgtgtggggttttttttgtagggttgtagtagttagaattggtagttgaagatttgggtaaagttggtgatttttgagatggatggtgtatagttgtggatgtttggaatggagtttggaagttgttggattggatgttggggatttttttgttaaatatttttgttattgtttatgggtggtggtagtggttgtttttgttgttgtggtggtggtagttgttttagttggttgtggggttgttttggtttaagtagatatggttgtgggagtgagggaggaggaggaagaggaggaggagagaaggaggaggtggtggttgtggtgaggaggagattgggagttgtgaagtttttgtttttggttggttgattgttggttgaggtgtagtatagttttggttaaatttttaattgtgtgtttatgtatagtggggtggatttggttttattggttagggttttgggagtaatagtaatattttaatttgtttaattagttttagtataataaagtattgtttaaaaagggggtggggggtattgagggggtgtgtgtgtttgtgtgtgtgtgtgtttgtgtgtttgtgtgtgtttttgtttgttgtggagtggggaggggttttagtttatttgtttttagtaaattttaaagatattgtagaagttatagtataaggttttgtgatgtttggggataatgtgttttaattagaagttttaaaagtgtatatgttttgggaatgaggtgggtgattatttttttttgttttttattattttgtttttgtgggttgtattaaaggtgagtgtagaattaaatattgatattgaaatagggagttaaggtgtagggagtggggagtggggggatgtaggatggaggtaagaaggaagggaaatagtattttttttttttttagtggagtgttgggaagtaagttgtaatttatatgttttgaaaatttgttttttggggaaagaggtaattttttttgtaggagatgagtattttttggatgtgggttggataggaatgtttaagaaggtataatgtttattaagttggtgaatggtagggagagtttttgtagtttaaagtttttataatgatttttaaaaattattgttttaaatatatataatttaaggaagtttaaatttttgttgttggtttgtaaaaagagttaaatagttttatttttgtttaatatttttatttatttttaagatattggaataaaggttttttaattatgtttagtggttaaagatttttgtaaaggtgaatggatttatgtataatttgttatatttttaggaaagaatgggaaagttttggaagtggggaaggagataaggattaaagtttttgtaaagttagatgatgtttattgattttttttttttggttttatgaatgtggtttagtttttttattttttagatttgggtttttgtatttttttttttttattttttgttgtaaagatattttatttagtttgtatgtaagggaagaaaggatttaagaattatttagttgatatatgagatttaaattttgttttttaggaggtg

SEQ ID NO: 437 - DNA, 2265 bp, Artificial Sequence
  Description of Artificial Sequence: Synthetic polynucleotide
tattttttgaagagtaaagtttagattttgtgtattaattgaatgatttttgaattttttttttttttgtatatgagttaagtaggatgtttttgtagtaggaaataaaggggagagggtatagaaatttgggtttgggaaatggagagattgggttatatttatggagttaggagggggaaattaatgagtattatttgattttgtaaaggttttgatttttgtttttttttttatttttgagatttttttatttttttttggaggtatggtaggttatatatggatttatttatttttgtgggagtttttggttattgaatatagttaaagagtttttattttaatgttttgaaaatagatgaaaatattaaatagaagtggagttgtttggttttttttgtaagttagtaatgaggatttgggtttttttaagttatatgtgtttaagatagtaatttttaaaagttattataaggattttgggttgtaggaattttttttgttatttattggtttaatggatattgtgtttttttgggtatttttgtttagtttgtgtttgggagatatttattttttgtaaaggaagttgtttttttttttaaagagtaaatttttaaaatatgtaagttataatttgttttttaatattttattaaaaaaaaaaaaaatgttgtttttttttttttttgtttttattttatatttttttgttttttattttttgtattttgattttttattttagtattagtgtttaattttatatttgtttttggtgtagtttatgggggtggggtagtgggaagtaaggaaagatggttgtttattttatttttaaaatatgtgtatttttgaggtttttgattggaatatattgtttttagatattatagagttttgtgttgtggtttttgtgatgtttttggaatttattaaaaatagatagattaagatttttttttattttataataagtaaaaatatatataagtgtgtgggtgtgtatatatataaatatatatatttttttagtattttttattttttttttaagtaatgttttgttgtgttaaaattagttggatgagttagggtgttattgttgtttttgaggttttggttaatagaattagatttattttgttgtgtgtaagtgtgtaattaaggatttaattaaggttgtgttgtgttttagttagtagttagttggttggagatagagattttatgatttttagttttttttttgttgtggttgttgttttttttttttttttttttttttttttttttttttttttgtttttatagttatgtttgtttagattagagtagttttatagttaattagggtagttgttgttgttataatagtaaggatagttgttgttgttgtttgtgagtgatgataggagtgtttgatagaagggtttttagtatttgatttggtgatttttaagttttgttttagatgtttgtagttatgtattatttgttttaggaattgttaattttgtttgagtttttagttattgattttgattattatagttttatggggggagttttgtatggttattgtttttttattttggttttttatggtaaagtttttaatttttattagtattagtattatggtgtgaatggttttgttgggagttatttagttaaagtttatgttgattatagttatgttagtttttattattagtatggtggtgtttataattgtgttttaagtgttattaattagttaggtatatggatagggggaaggttgggtagatatagggtgattaggatgttgggggtgtgagatggggtggtagattgggggttatagtggtttatggtagtgggggtgtatgtggtagaagggagtaggatttagattttttaataaagagagttttttgggttagtattttagggatttttagtaggagagttttgtggaggtttgaattagtgttttttttttttggtattttttaaggttttttagttgttgaatttttagtttgtttggttaggaagttggttaggttggaaaggggataggggtggagagaagaaagaattaagtagtttttggtgtttgtgtaataaagagaaggttatttgggaattttggtaagtgtgttgggttggtgtgagtgggaatagaaggttgttttaaaaatttagttaggattagtttgagagttgttataagttagtatggtgtgggtgttttgagtatgttgggtgggggtg

SEQ ID NO: 438 - DNA, 5907 bp, Artificial Sequence
  Description of Artificial Sequence: Synthetic polynucleotide
gttgttggagtagggttttagtgtattgtgagtttttgttttttttgttttgtagtgttgtgagttttttttttttttgtgtttggttttgtttgtgttttttttggtgtgggtatttgtagatttgttaggaggttgatgagaggtgtttttatagagttttgtttttttttagatttttaaatgaaaagaaagagaaaagttaattttttgtttttattttgtatgtatttggagagtggttggtggtgagtgatttgtataattgttttttttgtggtgtttttggatgggtggagagaatttgggtgattgagtttgaggttgagtttttttgggagtgatttatgttagttatttttatttttaagggggatttgtggttgggtttatgtgtgaaggatgggtgttagggaaattgatttatagatgatttgttttgtgagagattgataatttagttttgtgggtttttggggtgtttagattagtttttagttagaggatttggggttgtatagtttttggattttggagggggtggtttgggggtgggagattgtgagtattagtttatgttggtttttttttattttgtggtggtgaggtgggaagggttaggatgtgagtttagtattttttttagaaatgtagtattttgtttttttattttttttgtttttggtgtttttttttttatgtgtttttttttgttttttttttaagggtgttttttttttgtttttagtttatgtttgaattttttggtgttttttttttttttttttagttttttttttatgttttttgtttttgggtattttttttttttaattttttatttttgtattgtttgattttgaggggtgggagtgtattgggttgtgtatgggtgggggtgttgtgttagttttgtgtagttgttttgatgttgttgttgttgttgttgttgttgttgttttttgtagtttagtttgtgttttgtggtagttttgtagtgtattagttattattgttgttgttgttgttttgttagatttgttgttagtttgtttggtttagttttgagagagttttgaatgttagttgtgagggttatgagttagagagttttggggtgttgtgtggagagtaagtggagatagtgattttgtgttttttagtttttgtttttttgtattgtgttttttgtatttttgggtttttttgttttttttgttgtttttattgttgttatggttattttgttttgtagtaagttgtttaatgtggttatgtttgtgtttaataagttttaggttaagatgagtggtatgtttgttaggatgggtttttaggtggttatggatgaggaggtggtgggttttgtgtattgtgatgattttgattttgagtattgttagggtttgtagatggatattttgaaagttgagggagagttttgtggggatgagggtgttgaagtgtttgttgagggagatatttattattagtgaggtagtggagtttttttgttgttttttggttttaaggattaggtgggaggtggtggtgaatttgggggttatgataagtttaaaattatggtgtgggaggtaggttggaatgtgattaatgttatttaggtaagtgtgggatttttagttttgtttgttttttttttttttagtttagtgtgttgggttttgtttttgatagttgtttggtgattttggtttggagatttttttttgtatttaggaatttttttttttttattttttttagttttgtgtggggatttatgtttttaggtggtgttttttgttttaatttatgtttttttttaatggtattagttgtaagattgttaggttgaagtttggtttgagatatttgtttggagatattgtaaaagtgaaggaaatggggggagggagtaggaagtgatgagaaagaaagaaaattaggattggagggtatggtttggttttggattttggaatggatttatagttgtatttttgggaggaaagaagaaggggaaattgttgaggttggagttttttttttttgtatatatgtatagatatgtatatgtatataggtaggtatattatatgtttatagtttttttttttatgaataaaggtgtaggtataggtgtatatgatatgtatttatatatagattatagtattatttttaaatgtatttgtgtatatttttatagttttataaataaaagtatatatttgtatatattaaatatatgaatatttgtttgaatatatgtatatatatatgtatagatgtatgtagataggaattagtttgtttttttgggtgtggttttgttggagatatataggtatatatatatgaaagtatatatatgtttttatataaatatatttagtttgtaataatttagtattatttgtgtatagatttgttttttttgtttgaaattttggttgtattgtaaagaggtggttagtttttttttgtgtgattttggtgaagttttttttagaggttaagaatggtttttgttttttaggttttttttttttatttttaattttttattttttattaggtggtgtaggatttttatatagggagtaggtttggagttttggtaatgatttttgagttagtaggggttggtaggttgtagttttttgggttgaaggagattttagttttaggtaattttggttttttatagtttggttttgtggtgtttttggagtgtattattattggggttatggaaggtaggttttttgggagtagaggttttttaggggttgttttatgtattggggtaagtaggattttattgggttttgaatattagatggtttgatttaaggtgttttttgttttggggtttggtgagatggttttgttggattatggatttggggttgtttttgtttttgttgtgttttgtgattttttggggtgttttttaaggttttgtttgataggttttaagggaggttagggtaggaggttggaggtttgtaggtttttgggattttggattttgttagtttttagtttttgtgtggattttaaattttatagttttgtttgtttgattttgaagtttttggttttagatttttgtttggtttggttttttggtttttttggtgtttttttgttaagtttttttttttgtttgtttttttagtttttatttagtttttttttttaggttttgtttttgttttattttaattttagttttgttttaagatttttaatttttagttttgtttttttttttttgtgtgttgttttttaagtgtttttatattgtttttgtttttgttttttaggggttttgttttatttttagtttttttttttttttattttattttttttttgttttataattgtagtttttaatgtttttttttttggtttgagtttgagatgtttgagtttttttttttagtttttgtgttttattttagttttattataaattttgtgtttattttttttattggtttaggtttagtttattattttttttagagtttttttttgattatgtttttttttgtttttttttatttttttttttaattttttattttgtttttgtttttagaaattattttgaagtatttttttttttttttgtggtttttttttatttttagtttttttttattttagtttttttgttattattagttattagtgtattttttttttttagatttgtttatatatttttttttttttatttttggtttgatatttgggtttattattagtttttttatatttattttgtagtttgtttttaattttttttttttggtggtttagatttaatttttagtgtttttagtgttttttttgggttatagtgttaagttatgttttttgggttttttatttgttgttaagtttgttgagtgtttgtgtttggttgtttttttgttttatagggtatgtttgtgttgggtttattttatgttattttgtatggtggttatttggggttgttttttattatttttgttgttgttgtgtgttgttatattggtaagatttttattgtgtgtttgtatgaggagaatgaagatggtgaggtggtgtgtgtgtgggatttgtatgtggttatagttaatgtttgttgtgttttgtgttttttaatgttgggtggttgagtggtgaatgtagtgtagattattgagttggtgatgatgtgtattttgtatgtggtggtgagtggtaattttatgtataatagttttttggggttgtttgtgttgtagaagttttggtttattattgttatggttgtgttgttgttttgtgttttttttaagaattttaaggttgtgtttaagtttagtttgttgtgtattttggtttattttgttattaatattttggttatagtttattgtttattgtgggtgtgtgattgggtttgggagaaggttaagttttatattgatgttaagaagttttttatttttattggtattattgtgtttagttatatgttttagatttttttgtttttgttggagggtaatatgtagtagtttagtgagttttattgtatgatgaattggatgtatattgtagtttgtgtgtttaagggtttttttgtgtttgttgtttattttatttgggttgatgagattaaggaggttattatggataatttgtttggttttatttgtgttgtggttaatatttttttggtggttaaggtgttgttgttttattttttgttattttttgttgttgttgaggtgttggagaagttgtttttttaggaaggtagttgtgttttttttttggtttgttatagtggtgatgggtgtttgaagttttgggggttgatgttgtgttgtgtgtttgttgtttttatgttgtttatggttatttatgtgttgtattttgtgttgtttatgggttttattggtagttttatgggtgttggtttttgttttttgttgtttagttttttttatttgtgtttgttttggtgtaagttgttgtggtattaagttttttttgatgttgttatttttgttattggtggtatttgtagtgtgtttggttttgtgtatttttttgagggttttattgaagtttattgaattaatgtggaggattagggtgtaagggtgagtttttgttgtgtttttgtgtttttttttttttttttttattttgtttttattagtttagtgtgttttgttgttgtgttgggaggttaagttttaaatatttttggtttttagtttttgattatttggggatgggggggatgggaggggatagggatttatgatttattgtgtttgtgtttttgttgtttttttttttttataatattttggttttggggggaggtggggtgtatttgtgggtagggttttttgtttttttaagtggggttttgatattttggttttagttattgagggggttgggaagggagggagagggggtgtagtttgtaggtgtggtaatttgattttgggggaatattttatatttatttagagtttggaatttatagtgtttagttatttttagtaagagtgttttttattttggagatgttttaattttgtagtgggaaaggttgattgggaaatttattttgggtgggtaattttttttaatgaagttggaaggtgagaagttgtggtggggttagtttgtttgttggtttttaggaatttaaatttttattttgtgtaatttattaggtgtggaattgttttattgtgtgtgtggtgtgtttgtggtgaataagatgaaatgtatattagaaaaaaatttatttttaatttagagtgtggtatataattatatttgtaaataaagaagagataaaggtttgtgtggtttggtgttgggtttgtg

SEQ ID NO: 439 - DNA, 5907 bp, Artificial Sequence
  Description of Artificial Sequence: Synthetic polynucleotide
tataaatttgatattgggttgtgtaagtttttgttttttttttatttgtggatataattatgtattgtattttaaattagagatagatttttttttgatatatattttattttatttattatgagtatattatatgtatagtagaatagttttatatttgataaattgtataagatgagagtttagatttttgaaaattggtaggtaagttggttttgttgtggttttttgttttttggttttgttgaaggaaattgtttatttaaaatggattttttagttagttttttttgttgtagggttgaaatgtttttggaatgggaagtgtttttgttggaaatggttggatgttgtagattttgagttttggatggatgtgaaatatttttttaaggttaagttgttatgtttgtgagttgtgttttttttttttttttttttaatttttttgatgattggaattaaagtgttggggttttatttggaaggatagagaattttgtttgtaaatgtattttgtttttttttaaaattagggtgttgtggaaaagaaaggataatagaaatgtagatgtgatggattgtgaatttttgtttttttttattttttttatttttgaataattagaaattaggaattagagatgtttaaagtttggttttttaatgtggtggtagggtgtattgggttggtgggggtggggtgaggggagaagggagagagtgtagaagtgtggtgggggtttgtttttgtgttttagttttttgtgttggtttggtaggttttgatgaggtttttgagggagtgtatgaagttggatatgttgtagatgttgttgatgatgaagatggtgatgttgaagaagatttggtgttatagtagtttgtgttagagtaggtgtaggtgaaagaggttgggtagtaagaaatagaggttggtgtttgtgaggttgttggtgaggtttatgagtagtgtgaagtgtggtatataaatggttatgagtagtgtgaagatgatgagtgtgtagtgtagtgttagtttttaggattttaggtgtttgttgttgttgtagtaggttgggaaaaaggtgtggttgtttttttggaagagtgatttttttagtattttgatagtggtaaagaatggtagaggataggataatagtgttttggttattagaaagatgttgattatggtgtggatggagttgggtaggttatttgtgatgatttttttggttttgttggtttaggtgaggtaggtgatgagtgtgaagaggtttttgagtatgtaggttgtgatgtgtgtttagtttattatgtagtggaatttgttgggttgttgtatattgttttttagtgaaggtaggaagatttgagatgtgtagttgaatatgatgatgttaatggagatggggaattttttgatgttgatgtagaatttgatttttttttaggtttagttgtgtgtttgtgatagatagtaggttatgattaggatattgatgatgaagtgggttagagtgtatagtagattgaatttggatatggttttgaggtttttaaggaaggtgtaaggtagtagtatggttgtggtgataatggattaggatttttgtgatatgggtagttttgggaagttgttgtatatgaggttgttatttattattatgtataggatgtatgttattattagtttgatgatttgtgttatgtttattatttggttgtttagtgttgggaagtgtggggtgtagtaggtgttggttatggttatgtatgagttttgtatgtgtattattttgttgtttttattttttttgtataggtatgtgatgaggattttgttggtgtagtagtatataatggtggtgaagatgatgagaaataattttaggtagttgttgtgtaggatggtgtagggtaggtttagtatgaatatgttttgtggggtggagaggtaattagatgtggatgtttagtgaatttggtaatggatgaggggtttggggggtgtggtttaatgttgtggtttgaagggggtgttaaggatattgagaattgggtttgagttgttggggaggagaggttaagagtaggttgtggggtggatgtaggggaattaatagtgagtttgggtgttgagttagagatggagagggagggatgtatggatggatttgagaaggaaaggtgtgttaatggttggtgatagtgagagggttagggtgggagagggttgagaatagggagaagttataggagggaagggagatattttgggatggtttttggggataggaatagaatgaggagttgggggaggagatgagaagggatagaagggagtgtagttggaaaggggttttaagaaaggtagtgagttgggtttgggttagtggaaagagtgggtatgggatttgtggtggggttggaatggggtatgggagttaaagaggaaaatttgggtgttttaggtttagattagaggaggaaatgttaaaggttgtagttgtgaggtgaaaaggaaatagggtagagagggagaggggttgaaggtggggtaaagtttttgggaggtaagaatagagataatgtgaagatgtttggggagtagtgtgtggggaggaggaagtagggttggaaattgagagttttaggataaggttggagttagagtgaggtgagggtgagatttaaggaaggggattaagtggaggttggggaggtaagtaggaggaggagtttggtgggaaggtgttagggaggttagaaagttgaattgagtaagagtttagaattagaagttttagggttaggtggatagggttgtagggtttagaatttatatggggattaagagttaatgaaatttagggttttggaggtttatgagtttttagttttttgttttggttttttttggggtttattaaatggagttttgaaagatgttttgggaagttgtggggtatagtgaaggtgggagtagttttgggtttgtgatttagtaaggttgttttgttgggttttggagtggaaagtgttttgggttgggttatttggtgtttggggtttggtggagttttgtttattttgatatatggaataatttttgggaggtttttgtttttagaaaatttgttttttgtggttttagtgatagtgtgttttagggatgttgtggggttaagttgtaagggattggggttgtttagagttgaagttttttttggtttagaaagttgtggtttgttagtttttgttagtttggaggttgttgttaagattttaaatttgttttttatgtaggagttttgtgttgtttggtggggagtggggggttaggaataaggggagagggtttagagagtaggggttatttttagtttttggagagggttttgttagggttatatggggaggagttggttgtttttttgtggtgtagttgggattttgggtgagaggggtgagtttgtgtataggtaatgttggattattgtggattaaatgtgtttgtgtgggagtatgtgtgtgtttttgtgtgtgtatatttgtatgtttttaatagggttgtatttaagggagtaggttggtttttgtttgtatgtatttgtgtatgtgtgtgtgtatatgtttaaatgaatatttgtgtgtttggtatgtgtaggtatatgtttttgtttgtggagttgtaggggtgtatgtaggtgtatttggggatagtattgtggtttatatatagatatatgttgtgtgtgtttgtgtttgtgtttttgtttgtgggaaggggggttgtgggtatgtggtgtgtttgtttatatatgtgtgtgtgtttatgtgtgtgtgtggggggaggagattttgattttagtgattttttttttttttttttttttaaaaatgtagttgtgaatttgttttagagtttaagattaaattgtgttttttaattttgatttttttttttttttattgttttttgttttttttttttattttttttatttttgtagtgtttttggataggtgttttagattgaattttagtttagtggttttgtagttggtgttgttgggagggagtgtgggttagggtggaaaatattgtttgggggtgtaggtttttgtgtagggttgggagggatggagaaagggagatttttgggtataggagggggtttttaggttgagattattgggtgattgttgggggtagagtttggtatgttgagttgggaggggggaggataggtagaattgggaattttgtgtttatttggatggtgttggttatgttttagtttgttttttatgttgtgattttgggtttgttgtggtttttgaatttgttattattttttatttggtttttggagttggagggtggtagaggagttttgttgttttgttgataatggatgttttttttgatgggtgttttagtgtttttgtttttgtagggtttttttttggtttttaggatgtttatttgtaggttttggtggtgtttaaagttgaggttgttgtaatgtgtgaagtttattgtttttttatttgtggttgtttgaaaatttattttggtgaatatgttgtttattttggtttgggatttgttggatatggatgtggttatgttggatagtttgttgtggagtaaggtggttatggtggtggtggggatagtggaaaggatagaaggatttgaggatgtggggaatgtgatgtaagaaggtgagggttggggggtgtaaagttgttatttttgtttgttttttgtgtggtgttttggggttttttggtttatgatttttgtagttggtgtttgaggtttttttagggttggattgggtaagttggtagtaggtttggtggagtggtggtggtggtggtggtggttagtgtattgtggagttgttgtggggtgtgagttgggttgtggagggtggtggtggtggtggtggtggtagtggtgttagagtagttatgtgaagttggtgtggtgtttttatttgtgtgtagtttaatgtgtttttgttttttggaattaggtggtgtgggggtgggggattggagagaggaaatatttggaggtaggggatgtgaggaaggggttaggagaagagaaagggggtgttgagggatttagatgtgagttgggggtagaagaagggtgtttttgggaaggaggtgggagggagtgtgtgaaagagggagtgttgagggtaggggaggtgggggggtgaagtgttgtatttttaggggaggtgttaagtttgtattttggttttttttattttgttgttgtagggtgggagggggttggtgtgggttgatgtttgtagttttttatttttggattattttttttagggtttgggagttgtgtagttttagattttttggttaaggattggtttgggtgttttgaaagtttgtaggattgagttgttagttttttgtggagtgggttgtttataagttagtttttttggtatttattttttgtgtgtaaatttggttgtgagttttttttgaaggtagaagtggttggtatggattgtttttaaggaagtttagttttaggtttagttatttgggttttttttgtttgtttagggatgttgtgagggaagtgattgtgtggattgtttgttattagttgttttttaaatgtgtgtagaatggaggtgaaaggttggtttttttttttttttttgtttgggggtttggaagaaggtaggattttatgaggatattttttgttagttttttagtgggtttgtgaatgtttatgttgagaggggtgtagatggggttaggtgtggaggaaagaagggtttgtggtgttgtaaggtggaggaagtagaggtttgtggtgtgttggggttttgttttgatggt

SEQ ID NO: 440 - DNA, 3049 bp, Artificial Sequence
  Description of Artificial Sequence: Synthetic polynucleotide
tatttggtgtagttggtttagattttgtttttgttttggttggtgttgttggtaaaggtgtaggtgtttgtggagttgtatgttattatgtggaagtttgatttggatagtttgttgaaggtttgttttaggaagttgaatttgaggtaatagtgtgaggtgtagtgttttgggggatggttggggttttggtttttgtttagggtgtttttaaatatttttttggttagtgatgtttttttgtaaatggtgatgtgtgttatttgttggaatttggtgtttgtttgtgtgttttgtttgatggtgtaggagttgtggtagttgatggtgatgtagtttgagtgttggttgttgtttagtgattgggatggtgtgagtagtgggtttgttgtgtttttggatggattgtggttagttagttttagtgtgggtgatggtgttttggtagaggtgtttttttgttgtttgggttttgagtagttaagtggtagtagtttgttatttagtgagttttttttgtgtattttgtgttgtgagggtggtggttttgggttgggttgttggggtgttttgaggtggtgtatgagttttggtagtttgaagtatttggttttgtgttgtagttggttgtgtttggggaagtagttgggtagtatgagttgtaagttttgtaggtaatttaggatgtagtggaagaggaagttgttttggtttagaaagaagtggtttttgttgttttgggttagtttttgtggttgttgttgtgtgaatatgtgttagagtagtgagttgggtattgatattattgtgtagtgttgggttatgtatatttggttttttatgtttagttttatgatgttggggaagagtggtggttttgtggaggatgatgaggagttattgttgtttttgttgttgtttttgttgggtaatttatgtgtgttgtttgttagagttatgatagagaggtggttgggttgggatagtggtaggaagttgtgttgtatttaggagttgtaattgttttttttggagttttggaatttggatgtttgtttagttttgtgttttgttgttgttgttgttgttattgttgttattgttattgttgttattttttagagttgtgtggagttgagtggtgtgagtgtgttgttgtgtgtttttttgagttttagtgtgttttgtttgttttgtttgtgtgttttaggtgagtgttgggttgtggtttgtgtgttgtttaagtagagttgtttgttttggtgttgtggtgtgtaggaggtgtgggtggtggtggagttttgtttattgggtgaggggaggtggggagtggggatttgatttgtattttaaatgtggatgttatgtggggttgttggttttattttggtttgtgagtgttgggggtgtttggatttttatttgttttttatttattagttttgttttgtggttttgtttaatttttttttttttttgaagaggatttgtttgagatttggtggttttggaagatagttttttggagggatagttattgtgttttttttttttttgttttagtttgtatttaaggattttggaaggaggatgtgaatttttggaagtttgttgttttgggagtggaaatgtgtggttgtttttggtttttttgtttgtggaattgggtgtttttagtagtgtagttgtggtttgttattgttggttgttgtgttattgaaagtagagagatgtgaaaaatttggagagatgaaagagttgttttagtttgagtgagttagattttgtttaagttgttttgtagttagtttggaaaataaataaataaatttagaaataaaaagtaaattttagtgttttgtagtaggatgttttatgatagtttattttttggttgtagagataaaatgagatgaagttttaaatttgtttttaattgtaattttttttttttgtagggtttttgaggtattttattttgaagtgaaggggtaagattttggaatgtttggtttttgggttttatttagtttttgttgaattgtgtttttagatttataatagttgtagatttaatgtaatttttaaagttatttttggtgtttgtatgtttatttttttaaaagtttaggtgtttttttttttttgtatgttttggttattttttggttttgtttaagtttttgttagttttagaaagggatatttatatatttgaaggtttttgtttggattttattttttaatttttgttgtttatatgtttgttttttttttttggattgtagtttatagaattgttttttttttttggaagttttttttggttttttaggtgggtggggtttttggatggttttttatatattgtttgtgttgtttttagtatgttttgaaatgttatatttatgagtgattatttgattattgatttgggtatgaaaataagtaagagtttttgaatgttgtaaaaagagaagagtgtagaggagggtgttaagaaatgattgggttattgaatgttttttgtgtatttgttattatttgtagggtattagggagtgaggaatgtaaaggtgaataatttttaaagtgtttttagtgtagtttaataagtaaagggttaggggtttgtgtagttattatattagtttgaagtatagattatatattaggataaattaggtaagatttttgtttttgataaaatttatttttttgtgtaattatttagtgagttttatagtttttttatagataaatgttatttttattttgaaatgtttatatttgtttaataattattgtgtttatgttagtgtgttgaaatgagattaatttttaaattagttattttaattgtaagtatagattttgatattgaatgtattttaatattttttttttgttgttgttttgttttttgggataaataatagataatataaaatttttaagttttagtgtaggattttgaggtggttgtgttattaggtgttatattagtgttagagatttgataaaattagttttttttttataaatttaa

SEQ ID NO: 441 - DNA, 3049 bp, Artificial Sequence
  Description of Artificial Sequence: Synthetic polynucleotide
ttggatttgtagaaaagaggttggttttgttaggtttttgatattaatataatgtttagtagtataattattttgaaattttgtattgggatttggaagttttgtgttatttattatttattttaaagaatagaataataataaaaaaagaatgttgaaatatatttagtattaaaatttgtatttgtaattaagataattggtttgggggttgattttattttagtatattgatatgagtgtggtaattgttgagtagatataaatattttaaaataaaaatgatatttatttgtgaggagattgtgaagtttattgggtagttatatagaaggataaattttattaagaataaagattttgtttgatttattttgatgtgtggtttatattttaaattgatgtgataattgtgtagatttttgattttttgtttattgggttatattgaaagtgttttggagattatttgtttttgtattttttattttttggtgttttgtaaataatagtaggtatataagaaatatttagtgatttaattattttttgatatttttttttgtatttttttttttttgtagtatttaggagtttttatttatttttatatttaaattagtgattagataattatttataaatatgatattttagaatgtgttgggagtagtgtagatagtgtgtagggagttatttagaggttttatttatttgggaagttagggaaagtttttagggggagggggtggttttgtgggttgtagtttgagggggaaaagtaaatgtgtaggtagtaggagttgagagatgggatttagataagggtttttagatatataaatatttttttttgagattgatgggaatttggatagggttgaagagtgattgaggtatgtgggagagaaggggtgtttggatttttggaaggataaatatgtaggtgttaaaggtggttttaaaaattatgttagatttgtaattgttgtgagtttaagggtgtgatttaatgaaggttgaatgggatttggagattgaatgttttggagttttatttttttattttgaagtgaagtgttttgaaggttttgtgggaagagggaattgtaattaagagtagatttgaagttttattttattttgtttttgtagttagaaaataaattattgtaaagtattttattgtgggatattgaggtttgttttttgtttttaggtttatttatttattttttaggttggttgtaaggtaatttgaataaaatttggtttgtttggattggggtggtttttttgtttttttaggttttttgtgtttttttatttttagtgatatgataattaatgatggtaggttgtagttgtattgttggaagtgtttagttttgtaggtgggagggttggaggtggttatgtatttttatttttggggtgataggtttttgaaagtttatgttttttttttagagtttttgggtgtgggttggggtgagaggggagggggtgtggtgattgtttttttaaggagttgttttttgaagttgttaagttttgggtgggttttttttggaagagggagaaagttgggtgggattatggggtggggttggtgggtggggagtgggtgggagtttgggtgtttttagtgtttgtgagttggggtggagttagtagttttgtgtggtgtttgtgtttaagatgtaaattgagtttttgttttttatttttttttgtttggtaagtgaggttttgttgttgtttatgttttttgtgtgttatggtattagagtaggtggttttatttaagtagtgtgtgggttgtgatttggtatttgtttggagtgtgtgggtaaggtgggtggagtgtattggaatttaagggggtgtatagtggtgtgtttgtattgtttggttttgtgtggttttaggaggtggtggtggtggtggtggtggtggtggtggtggtggtggtggtggggtgtagggttgagtgagtgtttgggttttggggttttggggaaggtggttgtagtttttgagtgtagtgtggttttttgttattgttttggtttggttatttttttgttatggttttggtggatagtatatgtggattatttaatgggggtggtggtgggggtggtagtggttttttgttgttttttgtggagttattgtttttttttgatattgtggagttgaatgtggggggttaggtgtatgtgatttggtgttgtatggtggtgttggtgtttgatttgttgttttggtgtatgtttatgtagtagtagttgtaggagttggtttgggatagtaaaggttgtttttttttggattgggatggtttttttttttgttatattttggattatttgtgggatttgtagtttgtgttgtttgattatttttttgagtgtagttggttgtagtgtgaggttgagtattttgagttgttagagtttgtgtgttgttttggggtgttttagtagtttggtttggggttgttgtttttgtggtgtggggtgtataaggagggtttgttgggtgatgagttgttgttgtttggttatttggagtttgaatagtaggagggtgtttttgttggggtgttgttgtttatgttggagttggttagttgtagtttgtttgggggtgtggtgggtttgttgtttatgttgttttagttgttggatggtagttggtgtttgggttatattattattggttattgtggtttttatattattgggtgggatgtgtaggtggatgttaagttttggtgagtggtgtgtattattgtttgtggaaagatgttgttggttaaggaggtgtttggggatattttgaatgaaagttgggattttgattgttttttggagtgttatattttgtgttattattttaagtttaattttttggagtaggtttttgataagttgtttgagttgggtttttatatggtggtgtgtagttttatgggtatttgtgtttttgttagtagtattgattagagtgaggataagatttggattagttatattgagta

SEQ ID NO: 442 - DNA, 4721 bp, Artificial Sequence
  Description of Artificial Sequence: Synthetic polynucleotide
atgtgaagtttagtatttttttaagtttttgtttatatataaaaagttatgttttagaggttttatttttaatttaagataagtaggatattttaaaaattatttatttattagttggtttgagaaaatttattgggtatttggagtaaggaggggggggagattttgaaattaaaaaagtaagagaaaataaaggtttagttatgagaagagagatagaaatttatgataatagaggtatttttttagtttaattgtttgttttagttgtgggggttggaggtagggtttgaggtggtgattgttttgatatttagttgttagataaataaaagaggttgtttggtgttagttttggtgttttgtttttttatgtttgtggttgtagttgttgtgtttggttggtttggttggaaattattggtttggttggagttgtgtattttatagtttatagggtggggggtgattatgttttttttttgtttttggattttagatttagtttttagtaattttggttttttgttttggtttgttttttaggtgtgtaatttatttttgtttttgttggtttgtttggtatttgtgtgggggatatggggttgtttatttttagtgtatttgggagatgtattttaagtgtgttggggaatgtgggggatttgtgggtgtttggggtgaatttttatattatattttgtgtatagagatgtagagtaaaggaaggaatggagaaagttgagaggataaaaggaaaggagttttagggttttagttgagaagtttaggttttagtgtagtaagaggtgataatgttattgaggtgttggggttttattaatttatagatttatttgtgtggaaggaaggaaaaagtaggggatatttaattttttttgtttgtttgtttttttgtattttggggttggtagagttgaaaggagatagatatttagtttggttttttatttaattttttttgttttaaaattttaaaggtgtgtggttatgatagtatttgggttattggtgtttgatgtgattttttgtatttattaaaggagtaaatatggagattttttagtttttatagtatgttttttttagttttttttggtgggtttggattaaatttaatttggttatatattttaatgtttttttgggtgtggggaggtgtgatttttttatttttttttgtatttttttgttgatttggaaatgaaggtgtttaatttttaattgtagattgtaggagtagtgtttgtagatttttttggggtaatataggagaaaatttggaagggaatttttagggaatgttttttgagtttttttttgttttttttttatttttagtttttagtttttttttaggagggtatgtatatttttttaggagggtatgtatatttttttaggagggtatgtatattttttttggagggatggttgtataaatgtattgttttaggggttttttttttagtattggtgttttggaaaatgttgggggtagggggataattttttatttagtttgtagagttggttaaggtgatgggggttgtagtatattagtttggggttgatttttttgtaagatttatagtaatatagttttttgatttttgaggaatgtttgagatttggttatttgaatattttgtatagtaggagggggagtgagtaggatgagggtggttgtgtaggttgtgtgttggtgggtgtttttgggtttagtttgtagtttaggtggttgggtagtaggaggtatgtggtgtgtgttttgttgtgggattttatggtttggagtagtagttttagttgttgtttttttagttttttgagtattgagtgtgtgagtgtttttagatttgttttggtgtttttggttgtgttggtgtttgtggttggtgggtggggatggtggtgatttttggtattttgtattgttttgtttaggtagtatttagttttgtttgggttgttgttattggttttatgtgtttggttgtttgttgttttttttttttgtagtttgtttttttttttatttttttttgtgtttttttttttgtttttgttgttgggtgtatggtttttttagagatgttggatgagtgtagattgtttggttttgaatatgtggggtgaggaggtgaggagaaaagttgtttgtttgttaaggagtgaatatgatttttgtatattatgaagaagttgggtgttgagttggggtagtaggtgtaggtgatagtagtagtagtaggggtttgggtaggagtggtggtggtttgaggggtgttttgtggtatgtgttagttttttggaggttggggtgtgtgtgggggtttgggggtgtttgttggggattgggggtttgtgttttggttgttttattttgtgtggtttgtgttttgtgtggttttttggttttggtgtgttttggaggaatttggttgttgtttttttggggatggttgagtttgtttttgttggtgtttttttaaaaagaggtttttttgtagtggtttttgaatgttgggtttgttagttttggttttttatatggaaggtttgtgggggtaaaaaatgaaaggtgtttggttgggttgttggaagaaggaaaaagttttttttttttttgttaagtaatttaatttgggggtggggagaagtaggtaattaaaaaaaaaaaagtaagtgatttattttttttttttatatttttagtaattggatttttttgaattttgtgtatatgaagatttaggggagggggttgagtggattttattttgtatgagatgtttggtaaaataagaaggtttttgtaaaatttaataattaaatatgtaaagttttaaatgaaaattattatttttttgaattttagaggtttgggggtgtttggttggaattggggtttaaaaaaagaaaatgtttataaagtataataagatgtttgatgggtggaaaaatgtatttatgagttatatttttttgtttttttgtaaagttttgttggttttttttttttttttttttgttaaaaaaaaaaaaaaaaattgtgtatttttttaatttatagaaagttttggttagattgttttaattttgtgtatttgggtggtttaggggagtttttggtttttttttttgtgtttttgggggtttaggtttttggtggggatttttttgaggttggtgtgggtgtaggggtagaagatgttgtggtggtggttgagtttggtggggttgatagtgtgggggagggtggtgtggtggtggtggagggttttagatgggttgtgtgtttttgttttttttgggtataagttgtttgttagtgtaggggttgttgatgtttttttttttggttgtggttggttgttgaggttttttgtatgggttgtttgttttgatttagttgtggtggtaggaggttttggtgtttttttggtgtttttttttttgagattttttttgttgtgtttgggagtttttttgtttttggtttgtttttttttggtgttttggtttttttgttgttgttaggggtttgttgtgttgtatttaggggtttaggggttgggtgtttggtggtttggtgttgatggattggttttgttttgggtagtttttttttgtgtggtgagtggattgagtatggtgtttggttggtttggttggtgtggtttggggataggattttttgtgtgttgagtagtaagtgagtgtgtttggggtttattgttttttgtaaggttttttgtttttgtttttttttttttttttttttttttttttttttttttgtttttagttgttgtagttgtgttgttttttttttgtttttttgtattttttttttggttttttgtttggttggttttattgtgtagtggtgtgtttggttttggttttgttatgtggttgtttagatattttgttgttttaaaaaaaaaaaaaaagtgattgtgttttgtaaataatagattgggtttttaaaagttatttttttttttaattttttgttattgttatttttttttgggtttgtagagggggtattgatggaggggagagagataggtggggggtagagaagtttttagaatggattgagttttggttggagttatggagaaattggaaaagtagggagtattgagtgggttttgttgtgagttttggagttgagtgagtgggttggtggtttgattttgatttggttgggttttgtggtggttattttgtgtgtgtttgttttagtgttttatttattggttttgttttaaaggttttggtggtggattttttggttgtgtttgagggtaaggggaggagagtgttgttttggtttaaaagatatttatattggattggattgaggttttgggaagtgtgtgttgaggggaatagttgttgagggtggggaggtggtgtgaatatgattttagtggtggttgtgtgtttttttttgtttttttagttttgggttttggtttttaggattgtttggagaagtgtgttttgtgtatagttttggaatgtatttggttggttgatgagttgtgaggggtagtattttggtgggagaaggggagtgggggtgggggtttgtttgtgtgttgtgggtaggtttttttttgggtttggaagatttttgttatttgttattttgttttttggtgtgggaaggttatttagtg

SEQ ID NO: 443 - DNA, 4721 bp, Artificial Sequence
  Description of Artificial Sequence: Synthetic polynucleotide
tgttgggtaatttttttgtgttgggaggtagggtggtgggtggtggaggttttttgggtttgggaggaaatttgtttgtggtgtgtaggtgagtttttatttttgtttttttttttttgttgggatgttgttttttatagtttgttagttggttaaatgtattttagagttgtgtataagatatatttttttaggtagttttagaaattggagtttggagttgagagggtgggagggagtgtgtggttgttgttgaggttatatttatgttgtttttttgtttttggtggttgttttttttagtgtatattttttagggttttggtttagtttggtataaatgttttttaaattgagatagtgtttttttttttttgtttttgggtgtggttaagggatttattgttagggtttttaaaataaaattaatgaatgaagtgttagggtgagtgtgtgtgagatggttattgtgaaatttagttgggttgaaattgggttattgatttgtttgtttagttttaaaatttgtggtgaagtttgtttggtgttttttgtttttttaatttttttatggttttggttggggtttaatttattttgggagtttttttgttttttatttattttttttttttttattggtattttttttatagatttgggagggggtggtggtggtggggggttggggggagaaatagtttttagaaatttgatttgttgtttgtgaaatataattgttttttttttttttttaaagtgatagggtgtttagatggttatgtgatgaggttggagttgggtgtgttattgtgtagtggaattagttgagtagagggttggagggggggtgtgggggggtggggaggaggtggtgtggttgtggtggttgggggtgggggagggaagggggaggaagggggagggaagggggtgggggtgggaggttttgtgggaggtggtgagttttgggtatatttgtttgttgtttggtgtatggaagattttgtttttgagttgtgttagttgagttagttgggtgttgtgtttggtttgtttgttgtgtgggagagagttgtttgagatagagttagtttgttggtgttgagttgttgagtgtttggtttttgagtttttgagtgtggtgtggtgagtttttggtggtggtagaaggattggagtgttaggagagggtggattggggataaggaggtttttgggtgtgatgaggagagttttggaggaggaggtgttgagaggatattggggttttttgttgttgtagttgggttgaggtgagtagtttatgtggggagttttggtggttagttgtggttaggggaagggatattggtggtttttgtattagtaagtagtttgtgtttggggggggtgagaatgtgtgatttgtttggggttttttgttgttgttgtgttatttttttttgtgttgttagttttgttgggtttagttgttgttgtagtattttttgtttttgtgtttgtgttagttttgaggaagtttttgttgaggatttgggtttttaggagtgtagggggaaagattagagatttttttaaattatttagatgtgtaggattgaagtggtttagttaaagttttttgtggattaaaaaaatatatgatttttttttttttttttggtagaagaaaaggagaggaagattagtggggttttgtaaggaaatggggggatgtaatttgtggatatatttttttatttattaaatattttgttatattttgtaaatattttttttttttaaattttagttttagttggatgtttttagatttttgaggtttgaggaggtggtggtttttatttggggttttgtatatttggttgttaggttttgtgagagtttttttattttgttagatgttttatgtggggtgaagtttatttggtttttttttttgagtttttgtgtgtgtggaatttgaggagatttggttattaaggatatagaggaaaaaaataaattgtttgtttttttttttttaattgtttgtttttttttatttttaaattaagttgtttagtaagggggaaagaggtttttttttttttttaatagtttagttgaatgttttttgttttttgtttttgtggattttttatgtaggaagttgaggttggtgagtttgatatttgggagttattgtgggggggtttttttttggggaggtgttgatgggggtaggtttggttgtttttagggaagtggtggttgggtttttttggggtgtgttggggttggagagttgtgtagggtgtgggttgtgtggggtggggtagttggagtgtaggtttttgatttttggtgggtgtttttgggtttttgtgtgtgttttggtttttgggagattggtgtatgttatggagtgttttttgggttgttgttgtttttgtttgggtttttgttgttgttgttgttgtttgtgtttgttgttttaatttggtgtttgatttttttatggtgtgtggaggttatgtttgttttttagtaggtaaatgatttttttttttgtttttttgttttgtatgtttaggattaaatgatttgtgtttgtttggtgtttttggaggagttgtgtgtttggtggtgaggatgaggaggagggtgtagggggaggtggaggaggaggtgagttgtggggagaaggggtgatggatagttgagtgtatggggttggtggtggtggtttgggtagggttggatgttgtttgggtaaggtggtgtgaggtgttaaaggttattattatttttatttgttagttgtgggtgttggtgtggttgggggtgttgaggtggatttgaaggtgtttatgtatttggtgtttaagaaattgaaggagtggtagttggagttgttgttttaggttgtggagttttgtggtgggatgtgtattgtgtgttttttgttgtttggttgtttggattgtaggttgggtttgggggtgtttgttggtgtgtagtttgtgtagttgtttttgttttatttgtttttttttttgttgtgtaaagtgtttaggtggttggattttaggtattttttggaagttaagaggttgtgttgttgtgaattttatgggaagattaattttgagttggtgtgttgtaatttttattattttagttgattttgtgaattaggtgagaagttgtttttttatttttaatattttttggagtgttagtgttggaagaaaagtttttagggtagtgtgtttgtgtagttatttttttagggggagtgtgtatatttttttgggagagtgtgtatatttttttgggagagtgtgtatatttttttgggaagagattgggggttgaaagtagagaagggataaggggaaatttaaagggtattttttgggggtttttttttaggtttttttttgtgttgttttgaaggggtttatgggtattgtttttgtagtttgtggttaaaaattagatgtttttatttttggattaataagggggtgtagagggaggtgggggggttatgtttttttgtatttggaaagatgttgaggtgtgtggttgagttggatttggtttaggtttgttaaggaaggttgggagaggtgtgttataaaggttggaaggtttttgtatttatttttttagtaaatatggagaattatgttgaatattagtggtttagatattgttgtggttgtgtatttttggagttttggggtaaagagagttggatggaaggttgaattgggtatttgtttttttttaattttgttagttttagggtgtagaggaataaataggtaggagaagttgggtgttttttattttttttttttttttgtatagataagtttgtagattagtggggttttggtgttttagtgatgttgttgttttttattgtgttggggtttgggttttttggttgagattttgaaatttttttttttttatttttttagttttttttatttttttttttattttatgtttttgtatatagagtgtgatgtgagggtttattttgggtgtttgtagattttttatgttttttagtatgtttgggatgtattttttgagtgtgttaggaatgggtagttttgtgttttttgtgtgagtgttgagtggattggtgggggtagaggtgaattgtatgtttggggggtgggttggggtggggagttgaggttgttgggagttgggtttggagtttgaggatggggagggggtatggttgttttttgttttgtgaattgtgaagtgtgtggttttggttgagttggtggtttttagttgggttagttgagtgtggtggttgtggttgtagatgtggaggagtggagtgttgaggttggtgttaggtggttttttttgtttatttgatagttaaatattaaggtaattattgttttgggttttgtttttaatttttatagttaagataaatagttgggttaaaagaatgtttttgttattataagtttttatttttttttttatggttgggtttttatttttttttgtttttttaattttagagttttttttttttttttattttagatatttgatggatttttttaaattaattggtgagtagatgatttttaaaatattttgtttattttaagttagaaatagagtttttagaatgtggttttttgtgtgtaggtaaaggtttggggaggtgttgggttttatgt

SEQ ID NO: 444 - DNA, 2146 bp, Artificial Sequence
  Description of Artificial Sequence: Synthetic polynucleotide
aggtttgtgtatttgggtagtttttggttgttgttgttaggttgttttagttggttgttgttgttgtggtgattggtgataagttattagttatttatgatggtttaaggaggtgaagaagagtaagtgattaggatattaaaatggttattggaggtaggtttttagtatattagttggttgagggttgagttttgtgggtggtagtaagttttgggagttggaggtaattgaattaaaaggtgttttagaaattttgttttgggattttgtttagtagggttttgggttggagggtgttgaggtttggtggatgggatagtgggaagagagaaaggtgttaaggggatttaagatttgggatttagaataagagggggtggggaataattttattaagttaaatagatttattttttttgtttttatgttggaaaaatttaggttttatatggttttttgggagggagggagggagatggtggttgttggtttttttttagggttttgttggagaagggagatgagttttttgtaagaattttattttgttaagtatattttagggagagttaggagagtaataatagttggggaagttttgagagaggggataggttattttttaggatttaaaaaaattaatgggagaaagaaaaataataagaaaggaagatagagaaaggttgagatttttttagtagttgtggagaaaatttagttttggatttggttgttgaaagaaaagagagagaggagaaaagaggagagaagtaggaagatagaggggagagagagagggagagagagagagagagagagagggagagagagggagggagggagggagggagagagagagttgttgtgtggaaggaagtttaaagtttgtgaattttttttgaattgagattggagttatatgggttataaattattgagatatattttttgttatttataaattgatagtttattttagtttagtttattttagttattgatgaggggagaataggtagatataatatatatttatattgagttttagagtgagtggtaggtgataaattttttttttttgaaggtaaaggaaaaaaagattattgtttaaagttgtgttgttttttgtttttttgtttttgttttgtaaagttattttggttggggagtttgaggggtagattggttagaggagttgtgtggtgtttgttttaatttatttggtttaggagtaggggtgtgtaggagggagggggtgggggagtgggaaaaaaaatagaagattgaaaggtgttgggtggtttagtttgttagaatttagttttgggttttagtagggttaagttgttatagtgtggttgttttataagattggtatgttttattttttgtaataatggtttttgtttttgtatagggaaaaaaaattatatagatatatatatatatttatttatatataagtttatatttttttatttttttttttttagtaagtttagatgtttgataaggagggaaggtgatggtggtgatggggaaggggggaaattttaaaatatttgtttttttaaaaaaagagtaagaagaaaagaaggagggtttttttttttttttttaaagaataggtaaaaatttaaatttagattggagggatagggaggaagaggtgagtaaaggtaaggaagggtggtgaagtttatagttttttttatattttattagtgaattattatgttaatatgagaagtagtatttggaggttgagttaaaggtaggtttggtttgggggtgagggtgttgggtgtttttttgtatttatttgtaattggaatattaggatttttttagaaagtagttttgggtttttaatttttatattttggttttttttttttgagtttttagttttggttttttttttttattatattttttttattttttttaaatttttttttagtttttaggtttagtttttaattaagggagagggaaagattagaatttaaaaaaaaaataaaaaaaaaatatttttttttttttttttttttgagaatagataataagtggtgagtgatgattttaaaaattttgaatattttgtagggggaggagggttgagaaaagggtgataaaagga

SEQ ID NO: 445 - DNA, 2146 bp, Artificial Sequence
  Description of Artificial Sequence: Synthetic polynucleotide
tttttttgttattttttttttaatttttttttttttgtaagatgtttagagtttttaaaattattatttattgtttgttgtttgtttttaaaaagaaaaagggggaggggtgttttttttttgttttttttttaagttttggttttttttttttttttggttagagattgggtttggagattggagggagatttgggaggaatagagagggtgtagtggagggaagaagttggggttggagatttagaaggagggagttagagtgtgagggttggagatttagaattattttttaaaaaagttttggtgttttaattgtgaatgagtgtagaggggtatttggtatttttatttttgggttaggtttgtttttgatttagtttttaaatattattttttatattagtataatagtttattagtggggtatggggggagttgtgaattttattgtttttttttgtttttgtttatttttttttttttgtttttttaatttagatttaaatttttatttgttttttaaggaaaaaaaaaaaaatttttttttttttttttttattttttttttggggaggtgggtattttaaaatttttttttttttttattattattattattttttttttttattaggtatttaagtttgttaaagggggagaggtgggggggtgtgagtttgtgtgtgagtgagtgtgtgtgtgtgtttgtgtggttttttttttttgtgtaaaagtagaggttattgttatggagagtagggtgtattagttttatagggtaattatattgtggtggtttagttttgttggagtttggagttggattttggtgagttgagttgtttggtattttttggttttttatttttttttttgtttttttatttttttttttttgtgtatttttgtttttaagttgagtgaattgaagtggatgttgtgtggtttttttggttggtttgttttttgggttttttagttggggtggttttgtggggtgggggtgggggggtggggggtgatgtagttttaaatagtggttttttttttttttgtttttaaggaggggagatttgttgtttgttgtttgttttggggtttgatgtgaatatatattatgtttgtttgttttttttttgttggtggttaaggtaagttggattgaaataggttattagtttgtgaatggtggagagtatgttttaatgatttatggtttatatgattttaattttggtttaagaagagtttataagttttaagtttttttttatgtagtgatttttttttttttttttttttttttttttttttttttttttttttttttttttttttttttttttttttttttttttttgtttttttgttttttttttttttttttttttttttttttttttttagtagttagatttagggttgaattttttttgtggttgttaagaaagttttaatttttttttgttttttttttttgttattttttttttttttattaatttttttaagttttggaagatggtttatttttttttttggggtttttttagttattgttatttttttggttttttttggggtgtgtttggtaaggtggggtttttgtggggggtttattttttttttttagtgagattttggggggaagttggtagttattgttttttttttttttttttgaggagttatatggaatttgaatttttttaatatggaggtaagggaaatagatttgtttggtttggtagagttgttttttatttttttttgttttggattttagattttgggtttttttagtatttttttttttttttattgttttgtttgttaggttttggtgttttttaatttggagttttgttgagtaaagttttgaagtggagtttttaaggtgttttttaatttggttatttttagtttttaaaatttgttgttgtttgtggggtttggtttttggttggttggtgtgttgggaatttgtttttgataattgttttggtgttttgattgtttgtttttttttgtttttttgggttattgtaggtggttggtagtttgttgttagttgttgtggtagtagtgattggttgaggtagtttggtagtagtagttagggattatttgggtgtataaattt

SEQ ID NO: 446 - DNA, 2427 bp, Artificial Sequence
  Description of Artificial Sequence: Synthetic polynucleotide
ttttttggggtttgggtggggagttttttttagtaataaatatgagagggatagagaatgttagagagttttttgttgggattgggatggttggagggtattatagtattggttttgaatattgaatggagaattgttatgtaataagaatttgggtatattagatttttgtaggtatttttgggatttatagattgtatatttgatgggtgtttgtaggatgtgaatggtattttggtaatgttaagttttattttagagttatagggtgttttttattaggttatggagttttttgggttatattgtttagggatattttgtaggggaggaaattgttttttttttttttttatgatttttgtatgaattttaattaagaaatattatatttagaattatagtatttatagtgatagtttttagaagattgtaatagtttttttgttatttaaggggtatagatggtgtagttgtttatttgaatgattttttaaatgagtgattattattattttaatttttttagttgtagttttgttataggttattgattataagtgttggtaaagaaattgtttttttaagtattttggtgttttttggagtgatggttatttttagtagttaaattgtattatatttttattttaattttgtgattgttttagtatttttaaaaatataaattgattttttaggaaaaaataaaaaaatgaaaaaattttttattttttttaaatttttggtttaggtttatttgattttttgtaagttgttttttagggtaggttttagttttatttgttgtgtttgtttttttattttattttagttgagtaggtagagtttgtttttggaaatggtttggttatttgggagggaataaataggtattgtttagatttggagttgtaggtagggtttagtaggattttaggtgggtatataggggtttatttggagggatttgaggggtataggttatagttgggagagttttgggtaggtatataggggtttatttggagggatttgaggggtataggttatagttaggagagtatagataagaggtttttgaggttattagggttgatttttattttattttaaggattagggatgtaaaaggattttaataaagatggttatattatttgttgtagaatgagtataaatgttttttttagtttttgaggttggtattggttttgttgatttttttaattttgttatttgtgtagtaggtggtaatagggataggtagatgatatagttggggttagaggatgatgtagagagatttatattagagatttttggggagtgatagagtttttgttttaattttagtgagtgggataggttgagtggggattgagtatgtttagggttagagtgggagggttagttgtgttggtttttaaagaggattttgggaaataaatatttttttatttggtaaggataaattaagtaattgttgagataggtgtttgtgttttaatttaaggttgtttagatagataagtgtttattgttgtattgttttaatagttgttgagatatatttttgtagttgttttagttagagttagggaggttttgggagaatggttttgtttgtttttagtttttttttatttttaggagtttttttttttttttattttaattgatatttttgggttttttatttgtttagagtttgtttagtggggtatttaatggtggataggtgagagaggtgaggggttgggttgttattgtggttaagggagttatggttttttagtttgaatggtttttgtttgaaattaggatataaatatagtattatatatagtagaaatagtttagaaaggttttagtttagatggtattggaataaatagttttttttaagttattttaaaatgaaagttttgggttatttatttttaaagaggattttaggatagttttaggagtttttttatgatatattttatggagaatgtttggttgttgtgtttatttaatgtagttattgaatagaaatttaagagtgttgttttgttagtttgaaattttttttatgtttttagttattagggttttagttaggttagaaataatagaggtagtaggtttttttagaatagtagtgtgaggttttttatagattttttttagtaatattattgttagtggtgaatattataaatagtatttatttaaagtttttaatgtgttttagggatatatggtgaatggagaaatgtttatttaagaaaattatttaagtggtagtaggaatagtaattttgtgatatttgggttataatttgtttttttatttttatgtgataaaagttttatttttagtaggtaattgagaagataggtttttttttttttagtgttattgtagtagtggtgggt

SEQ ID NO: 447 - DNA, 2427 bp, Artificial Sequence
  Description of Artificial Sequence: Synthetic polynucleotide
gtttgttattgttgtagtggtattgggggagagggagtttgtttttttggttgtttgttgggagtagagtttttgttatatggggatggggaagtaggttgtggtttaagtgttatgaagttgttgtttttgttgttatttaggtggtttttttggataagtgtttttttatttgttgtgtgtttttaagatatgttagggattttaagtgggtgttgtttgtaatgtttattattggtagtgatgttgttggagagggtttgtggagagttttatattgttgttttggaagagtttattgtttttgttgtttttgatttggttgaaattttgatggttggaagtatgaagaaggttttaggttggtagagtaatgtttttgagtttttgtttaatggttatattgagtaaatgtagtagttaagtattttttatggggtgtgttatggaggaatttttggaattgttttgaagttttttttagaagtaggtagtttaaaatttttattttaaagtgatttggggaaaattgtttattttagtgttatttgggttggggtttttttgggttgtttttgttgtgtatgatgttgtgtttgtgttttgattttgggtagaagttgtttaggttggagggttatggtttttttggttgtggtgatagtttagttttttattttttttatttgtttattgttgggtgttttattgagtagattttgagtaaatgaggggtttggagatgttagttagggtaaaggggggaaaaggtttttgaagatgagaggaggttgagagtaggtaaggttatttttttagggtttttttggttttagttgaggtggttgtaggaatgtgttttagtagttgttagggtagtgtggtggtgagtgtttgtttgtttgggtagttttgggttgggatgtggatatttgttttggtagttgtttgatttgtttttgttgagtgggagggtgtttgttttttggggttttttttggaagttggtatggttggtttttttattttggttttagatgtgtttagtttttatttagtttgttttatttattggggttggggtgggggttttgttattttttgagggtttttgatgtgggtttttttgtgttgttttttggttttagttgtgttgtttgtttgtttttgttgttgtttgttgtataggtggtaggattagaggggttagtgaggttagtgttggttttgaaggttaagaagggtatttatatttattttgtagtaggtggtgtggttgtttttgttaaaatttttttgtgtttttgatttttaggataaagtaaaagttggttttggtggttttgggggttttttgtttgtgtttttttgattgtagtttgtgttttttaggtttttttagatgagtttttgtgtgtttgtttggggtttttttgattgtagtttgtgttttttaggtttttttagatgagtttttgtgtgtttgtttggggttttgttgagttttgtttgtagttttgggtttgggtagtgtttgtttgtttttttttaggtggttgggttgtttttaaggataggttttgtttgtttagttggagtggggtggagaagtagatgtagtaggtagggttgggatttgttttgaagggtagtttgtaggaggttaggtgagtttggattagggatttgaaggaagtgagaagtttttttgtttttttgtttttttttggagagttgatttgtatttttaaaaatattgaaatagttatagagttaaagtgggagtatgatatagtttagttgttgggaatggttgttattttagggagtgttaaagtgtttaaaagaatagtttttttgttaatatttgtggttagtaatttgtaatagagttataattaggaaaattagagtggtggtagttatttatttaagaagttatttaggtaagtagttgtattgtttgtattttttaagtagtaaagaagttgttatagttttttgaaaattattattgtgagtgttataattttgaatgtaatgttttttaattagaatttatataagaattatgaaaaaaaaaaaagagtaatttttttttttgtagaatgtttttgagtagtgtggtttaggaggttttgtagtttggtgaaaggtattttgtggttttggggtggagtttggtgttattgagatgttatttatgttttgtgagtgtttattgagtgtgtgatttgtgggttttgagggtgtttgtaggggtttgatgtgtttaggtttttgttgtatggtagttttttgtttagtgtttgaaattagtgttgtgatgttttttagttattttagttttaataggaagttttttggtattttttgttttttttatgtttattattggaaagggttttttatttagattttaggaaa

SEQ ID NO: 448 - DNA, 3015 bp, Artificial Sequence
  Description of Artificial Sequence: Synthetic polynucleotide
tttttttttttttttggtagaattgtttgatggttttgattatgtttaggtttattttgatgtagtagtaggtatggttggtttggggtttgggatagtttgttatgtagtagtaatagttttttagggtgttgatttttttatatttggtttttttatataggtggttgaagtgattgaatagattgtttaggagatttattagggtgtgggtagatttgttggtatttattttggtgaagtttatgatatttgtaaataaaatattgatttttttgatttgttgtattttaaaagggtggaaggttataggagttttttggatggaagattttttttttttgtttttggggtttgaggtggtatgttttttgatagaatttttattttttttatttttttgttttattaagttattggttatgatttttggtattatggaatgaattattttttttttgagggttttttttatttttaggttttttttgtgtataatggattgttttattttgaggaaggtgtttttggattttatttgggatatgatgaataggtggattttgatggtgtggatgtagttgtggagtagttttttgtttagtagtttttagtgtagggttttggttttgggtgaggggaagtaggttttattttggaaatggtagttaaaggttttgaaaaggatagagtaggttatttttagatataaatttaggtataaaggtaagtgtatgatggtatagagtaaaaagagtattttgatgtatatggagaagttttttatttgagataagtaagtatttgtgggttggttgtggttgtaaggttggagttgttgttgtgttttgagataggtgttaagatttggaattgtgtagttagggttagggtgaatattagtagggtgagagttagtgaggtttatgtgtaatgttgggtgtatagtttggtgaaggtaaatagaaagaagtttatatatattaggaggaagtatagtgtgggggtgattatgatgattagtttggattttatgtggattgtaaaatagatgttttatagaaggtaggtgaagttgatgtagaagagtgtatattggaattggtgttgggtttgtgggaagtagtgttttaggtaggttttttttaggtttattgagttgaatttggggttttattagtggttggaggtttttttgaatagttggggtagttttttttgtttgtgtagttggtttttgttgtttatttgttgggggatgtttttggagtttttagagttgttgtagttagaggagatgttgtatttgtagtgtttggggtggttgttggaggatagttgtttggggttgattttgatgtgtatgttgttgttgtttttgttggagttgtagtttattttggtgttgtggtgatgtagtagttgttggtggggtggggaagttatgttgttgagttttggggtttgttttggttggggttattagtatttgttagtaaaatggggagagttagtggtgtttttatttaggtatgtatgtttagaggtttgggatttgtttttgttttaaggggtggttttagtatgtgatttggataggtattatttgtttttgtggtttttggtttagtggtgtttttattgtttttattgtttttatttttgaggtgtatgagaattgtttgggatggatttagaatgtttgggggtttttgttgtgtggttgttgtggttttgggattgttttgtttgtttgttttttgtgttttttgttttgagggtggtttttgtgttgtgtggttttttttttttgtgtgtttgttttttttagttgtggttttggagggaagtttagattttgagtgtttttagttttgtgagttgtttgtgtataaataattttgttggtggtgtggagttttttattttgtaggagttgtgttttgatgtgttaaaggtggtgtgtggttggttttgggtttggattttgatttggagtagtgagttttggtgggtgtttttggtttgtgttttttggttgttttttgtgttttgggttggttttgtttgtggtggtgggtgttgggggtgggggtgttttgggttgtgagtgtgtggagtttgttggtgtggtttgtttagtggggtttgtttttttttgagtgtgttgttgtttttgttgtggttgtagttgttttgggattgagtgtgtggaattatggatgtgggttttttgttgggtggtggtgtagatgttgttgtagagttgggtttttgtgatgttggttgggatgtttgtttgtttgtgtttatgttgggggttgtttttttgagttagagatgtggttgttgttgtgtttgttgttgtgttttttgtggttgttgttttatgttggaagagttgttgttgttattatttttggtttttgttttgtttgttgttattgatagatgtgtgtttgtgttgttttttgtttagttgtagtgtgtatgtgtggtttgtgtttgttgttattgttttttggttttggatatgtgtatgggttgtgtgttgttttgttttggtgtgtgtgttgggttggggttgtggggtggggtggggtggggtggggtgtgtgtttggttttgttttttgttttgggtggtgttgtttttaggtggtgggttgtggttgttgtttgtgttttgggtgttgtgggtttgtttttttttggtgttttagaggttgtgtgttgtttggggttttgattttgtggagagatttgaaggtgtttgttgtggaagaagttgttggttgtaatgtttgggaaattaaaatgttgtttttttatttggtatgtttttgggataaattgaagtttttaattgttggattttttttttgggaggttttttttgttttgtaagtaatgaatgtgggttttggggtatttggtttgttttggatttgtttatggggtgatttttatgggtttagtttttaaagttgggtttattgatgattatgtttttttg

SEQ ID NO: 449 - DNA, 3015 bp, Artificial Sequence
  Description of Artificial Sequence: Synthetic polynucleotide
tgggggaatgtggttgttggtgggtttagttttggaggttaggtttgtgaaggttgttttgtgagtaggtttagggtaggttgagtgttttggggtttgtatttattgtttatagagtaaggggagttttttgggagggaaatttaatggttggaaattttgatttattttaaaggtgtgttgagtgggaaggtaatattttgattttttaaatgttgtggttagtggttttttttatggtaggtgtttttaggtttttttgtagggttgggattttgggtggtgtgtggtttttgggatgttgagggagggtgggtttatagtgtttggagtgtggatagtggttatagtttgttgtttagaagtggtgttgtttggggtggggggtggagttgagtgtgtgttttgttttgttttgttttgttttgtagttttagtttagtgtgtgtattaaggtggggtggtgtgtggtttgtgtgtgtgtttggggttaggaggtggtggtggtgagtgtgggttgtgtgtgtgtgttgtggttgggtgaggggtggtgtgggtgtgtgtttgttagtgatagtgggtggggtaggggttggagatggtggtggtggtagtttttttgatatgaggtagtggttgtgggggatatggtggtgggtgtggtggtggttgtatttttagtttggggaggtggtttttggtgtgggtgtgggtgggtgggtgttttggttggtgttgtgggagtttggttttgtggtagtgtttgtattgttgtttggtgaggggtttgtgtttgtggttttatgtgtttggttttgggatagttgtggttgtggtgggagtggtggtgtatttggggggaagtaggttttattagatgggttgtgttgatgggttttgtgtatttgtagtttggggtgtttttatttttagtgtttgttgttgtgggtagggttggtttggagtgtggggggtggttggggagtgtgagttgggggtgtttgttgaagtttgttgttttgggttggggtttgggtttggggttggttgtgtgttgtttttgatgtattggagtgtggtttttgtaggatggagggttttgtgttgttagtggagttgtttgtgtgtaggtggtttgtggggttgggagtgtttaaggtttgaatttttttttggagttgtagttggaggaggtgagtgtgtgaggaggagaagttgtgtggtgtggaggttatttttggggtgagaggtgtggaaggtgagtgagtaaagtggttttggagttatggtggttatgtggtggggatttttgggtgttttaggtttgttttgagtggtttttgtgtgttttgaaggtgggggtggtgggggtggtgggagtattgttgagttgggaattataggaatagatggtgtttgtttaggttgtgtgttggagttgttttttaggataggagtaggttttgggtttttaggtgtgtatgtttaggtgggagtgttgttaattttttttgttttgttggtaggtattggtgattttggttggggtaggttttgggatttgataatatggtttttttattttattagtagttgttgtattattatagtattgaggtgagttgtgattttagtggggatagtaatagtgtgtgtgttaagattaattttaagtagttgttttttaatagttattttaagtattgtaaatatagtattttttttagttgtagtagttttggggattttgggggtgttttttggtgagtgggtggtggaggttggttgtgtaggtagaagaagttgttttagttgtttgagagggtttttagttgttggtgggattttaagtttgatttggtgaatttggaggaggtttgtttggagtgttgttttttgtagatttagtgttggttttggtatgtgtttttttatattggttttgtttgttttttgtggagtatttattttgtggtttatatgagatttagattgattgttatggttgtttttgtgttgtgtttttttttggtgtgtgtgggtttttttttgtttatttttattaagttgtatgtttggtattatgtgtggattttgttggtttttattttgttggtgtttgttttgattttggttgtgtagttttaggttttgatgtttgttttaggatgtggtgatagttttaattttatggttatagttggtttatagatatttgtttattttaagtggggagtttttttatgtgtattgaagtgttttttttgttttatattgttatgtatttatttttgtatttgagtttgtgtttgggggtggtttattttgttttttttgagatttttggttattatttttgggatgaagtttgtttttttttgtttggagttggggttttgtattgggagttgttgagtagggggttgttttatggttgtatttatgttattggggtttatttgtttgttatgttttaggtgaggtttaggagtattttttttaaggtggggtaatttattatgtatgggaaggatttggaagtggaaaaagtttttaaagagaggatgatttattttgtgatgttaagaattatagttgatgatttaatgaagtagggagatgaggagagtgagaattttgttaagaggtatgttattttgagttttaagaataggaagaaaaagttttttatttaaaaagtttttatagttttttgtttttttaagatgtagtagattgaagaagttagtattttatttgtagatattgtgggttttattaagatgagtgttaataagtttgtttatgttttggtgggttttttgaatgatttgtttggttgttttgattgtttgtgtgaggagattaagtgtgagaaaattagtattttgggagattgttattattgtgtggtgggttgttttgagttttgggttgattatgtttattgttgtattgagatgggtttgggtatgattaaggttattgagtagttttgttaggagaagaaggaga

SEQ ID NO: 450 - DNA, 3093 bp, Artificial Sequence
  Description of Artificial Sequence: Synthetic polynucleotide
gttattatatttggtagtggggtggtttttagtttttgttgtttttttgttttttttttttgtttgtttttggagtttagttgatttttgaggttttaattttatttattttttttttgggttgttgttgttgtgtttttttttatttttatttttttgaggagagttataggttgtaaatttaattaattttgtaatttatttttgtaaaattatttataaagattttttttttgtgtttgtgtttgttttttttgtgttgggtttttttagttatggttataaagtgtttttttttttttttgagttttgtatataaggaatgtgggttggggttttgtttgtttttttttttgtttaaggtaaggattttgggaatttgaagtttggtgtttattatgtttaggtttgtagttttttttttatagagtttgtattatgggaaaaaataaaataaaatttaggaaagggaggtaatagttattgggagttaatatagagttatgtagtgtttaaaatataaatattgtagtggttagaaattttgttattttttttgtttttttaggttgttttgttgaggttttttgagtttttttgtatattgaaaggtattgtaggtgtagtgtgtattttttttttatttattttaagaagttttgttttgttattagtttttttttttgggatgagtagggagagtgtgtggaggtttttgatttttttgattataattaagaaagaataatttttaaagtgtttaatatttttgtttttaagttttttaaaatataggggtagggaatattaaaatatttggtttttattaggaagattatggttttgaaaggaaatagtagatatgatattttattttatttggatttatgattaaaaaaataaaaataaaaatttaaagagtttgtttgtattttttttttttaaattttggtttggtttgaaggtagggaatttaaaagattgaggttgatggaagagagttagtggggtgagtgagtgggtagtttttttttttgttttttggagttatttagaaggataggggaagggaaggaagaagaggtgaggaaaaagaggagggagggaagtggaggttaggagtgatggagtaaggaaagtagtttgtaagtgagaaaagagggaaaaaatatagttgtatgaatttagagagattataagttgtatgtaagtagtagtagaaagagtgagagtgtgagtgtgtgttttttttgtgtttggggttagatagtttttagattagtttgaattattttttaagtattgttttgttttttttgttttggttgttttttaatttttttttttttttttttttattttttttttaaaaattaaaataatataagggagggtggtaaaagtttttttaaattggttgatttatttaaagataataataataataataaatatataataatttatattttatggtgggagagatgtgggattaatttttggtatttattttaatatttgatagttagaataaataaatatatatatttatattaatagatatatatagaaaatttggagttaaagtatttggtaagagtggaaaaaaaaagaattaaaaggtaaaataatgattatgagtagtggtggtggtagtggtattagtggtaatagtggtggtggtggtagtagtagtagtagtggtggtagtaatagtaataattatttggtgtttggttttttttagaaattttttgtattattatttttaagaattttagttttaagaattaatagagtttaatttttggaatttgagttttggattttattattgttatgtggtaggggaggatttggtgttagttttttgagatttttattgtttttggttaattaaaagtttttaaagttataagatttttttattggttggtatattttgaggtttttataagtagagtgttttggatttggaggttttggtttgaggtttgaggggtttgaaggtggttttttttttttgggtttaagatgatggtatggtttgttttgttattattatgtgggttttttttttgtgatgttggtgtttttgttgtagtaaagtttggtttttggaattttgagaattaatttgttatttggtgatataagagggggagtgtgttttgtttttttggggtttggggttaatttttttttttttatttataaatttagtagattgagttaaatgtataaaagggagtgagaggtttgaattattgggaaaagtatgttatatatatagtagggttagagaggtgagtaagagaaaaataaaataaaataaatattatagttttttttaattagaatattaggtattatgagaaaaatatttgttaagtagtttttggtgggtttatttgttttatttttatttaggataggggtttttgttgttgttttgggtttttttttttttggtgtggtggtttgggatttttggtttttgtattttgatggtttatggatttttgtttttgattttttgttttttgtaagtttgtggtgttatgtaaattataggattggtattggttggatttttttgtatgtgttttttttttttttatttaattttttaagtgttttaaagatgtattattttaatattaatattattgaaagaagtttaaatttttggttatatgtaataattttagtttttatttttttttttttttttttttttggtgtaatttttttttttttttttggatttttgttgaagtgtgttttttttgtattttagagaaatgtttaaaggatttgttttggtttggtttgtttttttttaggatagtaagtggtgggtttaatttgttattgttgatttttgggaaattttttgttgtaagaaatgtgtgtgtgggggggagggtgggggtggtggggtggtatgtgtgtgttttttataaaattttgtgagttaaatatttgtttgtgttttgtttttttttaaggttttgagatttttgtttttgaggtttgttttaaggttgttgtaaaaaaatttttttagtttgtgtttaagagattagttgg

SEQ ID NO: 451 - DNA, 3093 bp, Artificial Sequence
  Description of Artificial Sequence: Synthetic polynucleotide
ttggttgattttttaaatatagattgaagagatttttttataatgattttgaaatgagttttgaaaataaaaattttaagattttaagagaaaataaaatataaataggtatttggtttatagaattttgtagaaaatatatatatattattttgttatttttatttttttttttatatatatgttttttgtaataagaaattttttaagagttaataataatagattaaatttattatttgttgttttggaaagaaataaattaaattaaaataaattttttgaatatttttttgaagtgtaggagagatatattttagtaaaagtttaagggggaaaaagaaaattgtattaaaggaaaaaaaaaaaaaaaaagtgggggttgggattgttatatatggttaaaaatttaagttttttttaatagtattagtattgaaataatatatttttaaaatgtttgagggattagatagggaaagaaaaggtatgtataaaaaaatttaattgatgttgattttgtgatttatgtaatattataaatttgtaaaaggtaaaaaattagaagtaaaaatttataaattattaaaatatagaaattaaaaattttaagttattatattagaaagaaaaaaatttagaataatagtaaaaatttttgttttaaataaaaataaagtaaatgaatttattgaaaattgtttggtaaatattttttttgtggtgtttaatattttagttggaaagagttgtgatgtttattttattttattttttttttatttgtttttttaattttattatatatataatatattttttttagtggtttaaattttttgtttttttttgtgtatttagtttgatttgttgagtttatgggtaagaaagaaggaattagttttagattttgggaaagtaaagtgtatttttttttttatgttattgaatagtaaattagtttttagaattttagaggttgagttttgttatagtgaaggtgttgatgttatagaggaggagtttatgtgatggtggtggagtaggttatattattgttttgggtttggggagggagagttatttttaggttttttgagttttgaattggaatttttaaatttgagatgttttgtttatgaggattttgaaatatgttggttagtgaaaaaattttgtggttttgagggtttttggttggttaggggtagtaaaaattttggagagttgatattaagtttttttttgttatgtagtagtggtaaagtttgaagtttaaattttgagaattgagttttgttgatttttagaattggggtttttagaagtggtgatgtaagaagtttttaggaaaggttggatattaggtgattattgttgttgttgttgttgttgttgttgttattgttgttgttgttgttgttgttgttggtgttgttgttgttgttgttgtttatgattattattttattttttaattttttttttttttgtttttgttaaatgttttggttttaagttttttatgtgtatttattgatataaatgtatatatttatttattttagttgttaggtgttaaaataaatgttgaagattagttttatgttttttttattataggatatagattgttatgtatttattattattattgttgtttttgagtgaattggttggtttggggaggtttttgttatttttttttgtgttgttttggtttttggaaaggaggtggaggagaggaaggaggggaattagggggtggttggagtagagaggatgagatagtgtttggggggtgatttgggttagtttgggggttgtttggttttagatgtggagaggatgtgtgtttgtgtttttgttttttttgttgttgtttgtgtatggtttgtgatttttttggatttgtgtggttgtgttttttttttttttttttgtttgtaaattgttttttttgttttgttgtttttggtttttgttttttttttttttttttttttttgtttttttttttttttttttttttgtttttttgggtaattttgggaggtaaaaagggaggttgtttgtttgtttgttttgttggtttttttttattggttttggttttttagattttttgtttttgagttgaattgagatttggaaggaaaaaatgtaagtgaattttttgggtttttgtttttgtttttttggttataaatttagatgagatgaagtattgtgtttattatttttttttagagttgtgatttttttaatgagagttgagtgttttggtgttttttgtttttgtgttttggggagtttgggggtggggatgttgaatattttgaaaattatttttttttggttgtagttgagggagttgggaatttttgtgtgttttttttgtttattttgaggagagagattgatggtgggatagggttttttggggtgggtgggaaaggggtgtgtattgtatttgtgatgttttttagtgtgtggggggatttagggaattttgataggatagtttgggagaatgagaaaggtggtgggatttttggttgttgtggtgtttgtattttgggtgttgtgtgattttgtgttggtttttaatggttgttgttttttttttttaaattttattttatttttttttatggtgtaagttttgtaaaaagggaattgtgggtttgagtgtagtggatgttaggttttagatttttgaggtttttattttgggtgaggagaaagatgaatagagttttagtttgtgttttttatgtgtaagatttaggaggagagaagggtattttgtggttgtggttgaggggatttggtgtgggaggagtgggtgtgggtgtgaaagggagatttttgtgagtgattttgtaaaaatagattgtgaggttggttggatttgtaatttgtggttttttttgagggagtaagaatgggggaaggtgtggtggtggtggtttggggagggagtgggtagagttggagttttagaaattggttgagttttgggggtgggtggggagaaagggtgggggggtagtaggagttaggggttattttgttgttggatgtagtgat

SEQ ID NO: 452 - DNA, 2436 bp, Artificial Sequence
  Description of Artificial Sequence: Synthetic polynucleotide
agttttggatgataaggattaattgtttagggtgttggttgagaggaataggaagagtgttttgtggagtagggtgggtgagaagagttgggtggttgtggggtttttgtgtatgttgggtaggaagaggaagagttgtagtatgaaggttattagggagatgtataagaagtaggtgggggttattatgttgagtagttgtagggttagtatttttgattatatttttgtggggtttggggtgagaagaggattgattgattatggtgtttagggggtgtttttgtttgtttttttgtgttgtgtgtttggggtattgtatgtgattttatgtttttaattttttgttttgtggattttttttttttagttttttaattttggattaggtaggttagagatttgagtttgtagtggttttgggtttaggttttatttgggggtgagtgttgtttggggttttgagtgagtttggtgttttggtgtggtagagtttggtataggagggagggatttgtttgtagtttttaggagttgtgagggtggggggtattgggggataggattttttttttttgtggatgtggaaataagtttaggtttgggatttttggtttagatttttttaggaggagaaagggaaggatttggggttgggggtaggagaattagtggtatttgatttgttggaaattttgttttatatttttttttttttgtttttgtgtttttatttatatatatattttgggtagtatttagggattttattaggttatttaaggttttttggaggtatgtgtgtgtgagggattatgatgtgtgtgtgtgtgtttttgtttgtgattttgtatgtgtaatttgtgtgtgtttgagtatttgtatttgtgtatgtatatatttgtgtgtatagatatgtagtttttgttatttagttttaaaaaaattaattgaaataattgatatatttatatttgtttttgggtattgggtgaggtgggggtgtaattagaatatttgtgttagtgggttttggttagtatatttttttaatgttggttgtttgggttatttttttgtgaagagtgtttttatttgaggtgaaattaaaattttttttttgtgtttgttttttgtttttttgttgagagaaatttaaataatttttatggtgttgaaattttttttatgttgataagtttgttttgggtgtatgagtggatgtttggttagttttttttgggattgattttgttgttgtgtttagtttttattatgtttttattttattttatgttttatagttggggtttttggttagttttggaagttattgagaaataggattttgtgtgtttgagagaatttttttaggggttaaggaattggttagttggaggtgtgagaaaagttttgggaaggtggttgtatttaggatgggtggatgttatggggtttttgtttaggttgttttgtttgtatgggttgattggttattttggaattttttttgtaggttttagtgttttttgggaatttgtagtttttgtggagagtgtgggtttttttttattgttggggtgtagtgtagtgtatgtttgagggtggttgttgggggttgggtatgtttttagttttgtgttgttgggggttgtggtggtgttgtttattttagagagtttttggtttggggttttggtgaagtaagtgtttttttggtgttggttgttaggggggtgtgggagtagttagatgtgttgtagtgttgggaaggtggtgaaggataggggttaggggagtgaggggtgtttggtaggtagttttagttttggttttgtgtgggagaagggatagtagagattgtttgtggggttttggggtgtagggagttgtttgtttagttttggtgtttgttttgtttgtggtagagggtggtatagttggagttttggaaagattggtagtgttggtagttgtgggttttttggttattgttttttggatgtatgggaagttgttttttgtgttgttgttgttgtattgttgttgttgtagaggggtgaggaaattaatttattgagttttggttgttgataagaggagttttggatgttggtttttgttttgtttgaggttgtaaagttgtggatttggtttggttggtttgtagtttgtgttttgttttgggaattgggtaagtagtggggatgtggggaggagggagtgggtagttgttggttttttatttgggtgttagtgagtaagggttaggaagtggtggggatggtagttgggtattttttagttttgttatttttttttttgtttttgggggtggtgttttggttgttagttttagtattgtggatttgtttttttttttttttttgattttttttgagtgggttggggtgttttgtttggttttagtgtttg

SEQ ID NO: 453 - DNA, 2436 bp, Artificial Sequence
  Description of Artificial Sequence: Synthetic polynucleotide
tgggtgttgaaattaggtagggtgttttagtttgtttaaggggaattgagaggggaggagggggtaagtttatgatgttgagattggtggttagagtattgtttttaggagtggagggaggggtggtggggttggggggtgtttagttgttatttttgttgttttttggtttttatttgttggtgtttaagtgggaagttagtagttgtttgtttttttttttttatatttttgttatttgtttagtttttgaagtgaagtgtaggttgtgagttagttgggttgagtttataattttgtagttttgggtagggtgagagttggtgtttggggttttttttgttggtgattagagtttggtgagttgatttttttatttttttgtgatggtggtagtgtggtggtggtggtgtggggggtggttttttgtgtgtttgggaggtagtggttgagaagtttgtggttgttggtgttgttggtttttttaaggttttggttgtgttgttttttgttgtgggtgaggtgggtgttagggttgaatggatagttttttatattttggggttttatgggtggtttttgttgtttttttttttgtgtagggttagggttgaggttgtttgttgagtgttttttatttttttagtttttgttttttgttgtttttttagtgttgtggtgtatttggttgtttttgtgtttttttggtgattggtgttgggaaggtatttgttttgttggagttttaggttgagggttttttggggtgggtagtattgttgtagtttttggtggtgtaggattgggggtgtgtttagtttttggtgattatttttaggtgtgtattgtgttgtgttttagtggtagggagaggtttatgttttttgtggaggttgtgggtttttggggggtgttgggatttgtaaaggggattttaaggtgattagttgatttgtgtggatgggatagtttggatggaggttttgtggtatttatttattttaggtgtaattgtttttttagaattttttttgtgtttttggttggttgattttttagtttttggaaaagtttttttgggtgtatggaattttattttttggtggtttttgaagttggttaggaattttggttgtgaggtgtggggtgggatggggatgtggtgagggttgagtatggtggtggggttgattttaggaaaggttggttaagtatttatttgtgtgtttagggtgggtttgttggtatggaaaggattttggtgttatgagggttgtttgggttttttttagtaggagggtgggaggtgggtgtgaaggggggattttaattttgttttaaatgaaaatgttttttgtaaagaaatagtttgggtagttagtgttggagagatgtgttggttaggatttgttgatataggtattttggttgtgtttttattttatttggtgtttgagagtgagtgtgagtgtattgattgttttaattgatttttttaaagttagatagtagaggttgtgtgtttgtatatgtagatatatatatatataaatatagatatttaagtgtatatagattatatgtatagagttatagataaggatatatatatatatattgtggttttttatgtatatatatttttaaagagttttgggtaatttggtgaggtttttgagtgttgtttaagatgtgtgtgtgggtggggatgtagggatggagaaaggggagtgtgaagtaggatttttagtaggttaagtgttgttgatttttttgtttttgattttaaatttttttttttttttttttagggaggtttgaattagaaattttaaatttgggtttgtttttatatttatagaggggaggagttttattttttggtgttttttatttttataatttttaaagattgtaaatgagttttttttttttgtgttagattttgttgtgttaaggtgttgagtttgtttaaaattttaggtaatatttatttttaggtggggtttagatttgaggttgttgtgggtttgggtttttggtttgtttgatttggggttagggaattggggaggggaaatttgtgggatagggggttgggggtgtggagttgtgtgtagtgttttagatgtgtggtatggaggagtgggtgagggtgttttttggatgttgtagttagttagttttttttttattttgggttttgtaggaatgtaattgaggatgttggttttgtggttgtttaatgtggtggtttttgtttattttttgtgtatttttttggtgatttttgtgttgtagttttttttttttttgtttagtatgtgtgaggattttgtggttgtttggttttttttgtttgttttgttttatggggtgttttttttattttttttggttaatgttttgggtaattagtttttgttatttagaatt

SEQ ID NO: 454 - DNA, 17219 bp, Artificial Sequence
  Description of Artificial Sequence: Synthetic polynucleotide
tttattgtatattatttattttttaggttgttagtgtggtttttagttttttttaagttaaagatatattatttttttgtgaataagtgtgtgaatgtggttgtgtggtttatttttttgtatttaagttggttttatttatttggtaggaaagtttttgttaggtattgaggagtgtttgttatttagtttgtgtatttaagtatggatgtatgtatatgaatgttttttgtgtttttaagtgattttttttatatttttaaatgggttattgtttttggaatgtatttatagaaattttgttttagtttttagtttaataaagtttgggattttttttttagaatattgttatatatttttgtatttgtatatttatgtttatattttttttggttagttttttattttttatgtattttttgttttatttgggtaatggagtttaagtgttttgatttgttttagtatatgttatttaagtgtatattttaatttgagtatttgtattatttttattttttttgttttgtttataatgtggtttttttttaggttagattaatatgggtttgtagtttaaatgtaaatagaggattttttaagattataaatttttaaagaaaggaagaggagggaggaggagattggaatgttagtaatgagttatttatgtatagggtaatttatttgtttattttaagttgaagaaagaattagataaatgtttgtagaggtgtattaaaattttagattaatttaatattagttatatatatatatatataaatgatggattttataatatattagtgtttagtttttttttggaggttgtttttttgtatatatttaattttttataagtttttggttaaaagtatgtttatttatatagagataatttaaagattgttttgttttttttagtgtatatttgtatatgttggtggggtattttaggtttaggtttttggtttgtagtagttatagttagaggttttatttgattatagttatgtgtagatttttttgtttttgaatatttgtatgaattttttttgggaatattgagtttatgtttgttttttaaatttagtttttaaagtgagggtgtttattgtgtgtgtttatagttttttgattgagaaatatttggttaaattagattatttagtagttgtgtttggtttgtggaagaattgagtttgatgtattaagatgtgattgtgtatatataagagaaaggaaaattttaggtttagatttatagtttttttttattgtgagttattttgtttttaggaatttttattaggttttttgtttttttttttttattatattattttattatggtttttaaagggttaagagaaatttttatggttttttttttatttagtttttgggtttggaggttagtttgtttatttgtagtttatagagtttgttgttatttttgtgttttttttttttttagttttttagttgggagggagtttgtatgtttgtttagattgatttattattggtatattaataatatttgtgagagtgtggagattttgtttaggttttttggtttgtatggtttatggtggatagaatttggggagtgtgatggtgtttgtggggtgggggtagggggtttataggtattggttgttttgagtgtattatgggttttttttagttttggttttttgtgtttttattagtttggttgttggggtatagttatagttttgtgtgttgggtagttttatttttattttgtttaattttaaattgggtggggagtataggtgttgtgtttagagaataagagataggtgtgggaggtggggaggagtagttaggtagtgatgtgagtgggagtgagttaaagatatagtggaggtgattgtgggtaggaagaaagagtgggttgtgtgggttttgaggtgttgtatgtaatgtgttgttttgtgaagttatatttgtttttttgttgttttttgttattggtttttttttattttttagtggtgttttttgtagtttggatagtgaggttttggtttgtgtgggaggtggaggttaggatggttttgtaaagggttggagagaattgttaatgagttgtgtagtttattgatttggagaatattttttaattaatttttagttatttattggtgatagtgttttaaaggatagtgttggggttagttgagttttagttgtgatttgttggttgggtgtttgttgtttaaaatttgtgtgtttttttaaatattttaaggtaattggtgtgtgtggtggtgtatatttgtatattgaaggttagttttggattaaatttggatggtatattaattattgttttttttttttattttgttttatgtgttgaaattttgtttaaaataaatatgaaaattaatattgtaaaatttatattagataataggttgagagaggagtgggtagggttaaggaatgagtgtattttttaagtgtttatgtataggaatttttgaggttgataattaaaatgttttttatgtaagtaattttgttggtaaaattgaatttaatattttgtaaggattgattttggtttgtggtgtttgtttttagtgttataggaagtgttagatggttagaaatatttaagtttgtttgtatttattatttattattttttggggtgggttatttttttttagtttttatttttaggttattttaaggatttttttttaaaagattatttttagaattaaatattatattattttttttttagtgtttttttaaaatgaaaaaagggggggaaaatatagttaaaattttgagttgtttagtttagatgtagtgaggttgtgtgaatatttatttgaagtgtgttggtttttttttaaggtttgtttttaaatatatataatttttttttttttttttttgtttttttattttttttatttttattttttagatgttggtggtgtgtgttttggtgtgtgggtatttatagtttttagttggagattgtggattttttggaaaagatttattaatagtaaattatgttttgtttggttatggtttatatgttgttagatttgtttgtttttgggattttgggaagggtttatttgagtgtgtgagtggtgggaagtttgttgggattatgtgtgattttggttgttttattttatatatggtgttttaaggttttttttgtaaatagtaggtgtttgttattgttgttgtgagtttttgagttggtggaggttttgtggtgtagttgtttgttggttttgagtgtgggttttgtggtgttttgttttttttgttttggttgaggattttgttttggtgtgtaagtttttttttgtttatagtttttttgttatatgttttttgagtgggattaattttttttggttgtagatttttatatgtttattagggttatttattagattttttattgtttagtggagggtttaggttttgtttgtttttgttttttttttatgatgttgtttttgtataagtatattttatatttatttttgggggtttataatttaaaatttatgttgaatattggggagggagaggagggggaaagtgggagggggattgtagattataattttaaaagaatatttataaaataaagtgtttgatttggttggtgggtgggttaagttggaattttttgttttgtttgattttttagtagtttttttttttaatttatgtgatttgtgttttggggtaagttaagaaaaaatgggattttttttttgagttgtgtggtagtggtggtaggttgagtttggtttggtttgaggtatttgttatatatttttgtgtatgtatatgttgatgttttatttggaggaatgattggtttttggagaggtgagatgaggtggtggtggtggtggttgggggtttttatagtttttttttgagttgaaaaagaaagtagatggtaatttgttgtttttttttttttgtttgtgagttaatgttgaatttagttttttagtttttagtttattttttttttttttgtttgatttgtggtgtttagtggtgattgtgtttttgtgtatagatatatataggttgtaaatttttattttgtgaattttttgttttttttttggtttattgggaggtgttaggtttttagttgtgttttttttttttttggtgtttatgtggggttgtttaggttggttgtattttaaataatatagttatgaaataaaaatgaaagtgagttaagtagttaaagggaagtgtgaggtaaaagttttgtggggtatgttgtgggagggggttttgggagagggggttgattgtagtttttagtgtgtttgtttgtttatttgtttgtggttttttgggggaaaggtgttttgggtattgatttgaaatttttggtgggggagtaggtagggagtttgtgatttggttttttgaagtttttttttaagtggatttgaggtggtgagaaggagtggggggtggttgggtgggtggagagagatatgaggggtggggggggttggtgatgttaatgagtggagaaggagttgggttggagaagtgtggtgagtagtaaagtttgtggtttttggttgtttgtagtttgtttgtggtgttgtgtttatttgatttttttgttgtttgttggtagttggttgtttttggggttggttttgttgaggggtgggttttgggttgggtgggggtggggtggggtgggtttggggtttttgggtaggtggtgatagttttgtgtgattttttgggtttttgtagttggattgggtttggttgagtttagtagtttttgtgttgttgttgttgtttgtgtttgggtaggagttttagtgttatgttgatggtttgttgtgagtgtttgtttgggttgggtgtgtgtgagtgtgtgtgagtgttggttaagttgtttttgtgtggtgatagtgtggtttgggttttttgtttggtggtttgtgggttttttttttgttgttgttgtttgtttagtttttgtttttggttgtggtttgggtttttgtgtgttttttttgtagttgttgagtttggtttgtgtttagtgaggagtgtagttttgttttattttgttgttgggagtttaggttttgtttgttgttgtatgttgtgattttaatgtgttttttttttttggttttttttttttttttttttttttttttttgtttgtttttttttttgtttgttttattttttttttttttaatagttgttttttttttttttgtaggtgtagtgtttgggtgatagttgtttgtttgttgttgtttttagtttttgtaagtttgagttttgttagtttttgtttattttttgttgtggtgtttttgtggtggggttttgggaggggtgattttttaggaaaggtttgtttgagtttttttggttgttattgatgtatggtttggtatgttttggtttttttggatttgaattttggattatttgggtggtgttttttttttttgttttttggttttttttttttagtttgggttgagttggttgtgtatgtttgatttgggtgtatgttttgggtgagttggagattgatttgggtggtggtggtggtgagggttgttggtagagttagagttgaagggatgggggtggtgggggtggtttttttagttgtgtgttgagattttttttgttatttagaaggttagtggaggattgtaattattataaagtgttttgtattttgtttagttaaagttgttaaattttagtggtagtagttgttgttgttgttttttgttattagtgttgtgtttttttggttttgttttttttgagatttagtggagtgtggtttgtgtgtttttgtgtttatttttattttagtttgttttttttttttagaggagtttttttttattttggtgttaaaagttatttgaaaatattattttaggtaatggtggttgttttgtttgaattttgtgtttgagttttttggatgttttaattgtgtgggaattgtttggaggtgggggaaggggggagtagtttgtggaggtattgggaggtgtgtggggggtggttggtgagtggagatttgtttgtattttttttggtttttgagtatttttatggtttgtatttttgatggttggaggggttgtttaggttttttgttttggtgttgggagattattttttgtgttttattttttttgatagggagtaatttttggtttatattgtttgttttataaatttttatttggtaatgttgtgttgattggtgtttggtggtggtgtatagtttgtgtttgtagtagtttaatttaattgatatgtattgagtttttttagtgtatttggtgtggttttgggtgtggggggagggtgggggtaggtgggagggagggggaagtggagaagtgaggttttggtttttttggagtgtaaagttttaagggtgagttgagaagttttagttggtgaagttggtgggaaggggtaggagtgggggagggggtattttggattaattgtgtttagattgtgggtttggattttgtggttaatggtgattttatttggttgtttattagggtttttttatattgggaagggggtggggtgtttttttttgtttaaggataagatggtgtaggttttatgaaatataaatttgaaatggaggtggtttgtaaatttatatggaaagtttttaaaatattttggagtgtttttatgttaaaaataattaaaagtattttaagttgattattaagttaaggttaaggttaaaattagttttagttagtagatatttttttttttaaaaattagatttattattgattgtgggattggtattaggtgtgattttatttattttgttttagtttttagtatatagttataaaaatagttttttttaaagtagaagtgaaatatttttattgtttgaaatttgaaattttggtagaattaaatttttatgttttagagttgtttataataattgatgtaaaagataggtgagtaagtgtttttgtgagtagtgtttagttaggttgggttgtgaatgtttttaggattagtgtttgtagaatggaatgtatgtttttttttttttggtttttttgggggtggatatttttgtaagttaatttatatatttttttaatttttggtaataagtagaaagatatttggattattatgttgtaaaattattttttataaagatattttaggattagatattaaaagttattagattgaatgtatgtgagttatagatatagttggagaaaaggtttttggttgtgtgttgtggtaatatttttttttgaagtgattttttttatttaaaataagttaaaaataattgggaaggttgaagttgggtatttgtggggaaattttgaatgtggttttaggtgaggaggttgttttgttgttgtaggttggatgggagaattggtttgggttagtgtggagttgtgttaggtttttttggtttggttaggttgaattgtagaggttttggtttggtgtttagttattttttattttttttttttgtttttttaattttgtttttaggtataggttttttttggagtttgaagttgtatgtaaatgtttagaatttttagaaaatttaggaattgagtttggggtttgtagttttttagagttttatggttttttggggttgttgataaagaggtttgtttgtttaattttaaaagttttagaatttgggaggttgagttaggagaattgtttgaatttgggaggtggaggttgtggtgagttgagattgtgttgttgtattttagtttgggtaataagagtgaaattttgttttaaaaaaaaaaaaagaaaagaaaaagaaaaaaaaaagttttagagttaaaatgaataggggtggtgggggtgttgtaaatgtgaaggggttgaggggagggttgattgggggagaaatttgatgttggagataaataggttagtaaatttgtttttgatgtaatttgtaatatttttttttattttttttagggattttgtttttatggtaggttggtaggattaaagggttttttttttattttttagggatatattttttaattttgtgggattttaaaaatattttattaagggagttttaagaggtatgagtggtgggggggatttgtgatttattgggaattaaaatgtgggatttttttgaggtgttataaggtagagggggggaggggagattatatttattggtttggttagttttaattgttttggggaaaataagtagaaagttgttgaagggtaattttattttgtgtttttatttaagaaggggtttagggagttggggatgttgtggggtttgtaatgggtgttggtggtttggttttttttttgttttttttttttttgtttttttataagttttttgggagttgatttgggggttaggttgttatatttagtatttagtaaggggaggattttaatgaaaatagaggaggaggagagagtgagtaaaggagtgtatgggaggggaggttgtgtagtttatggagaaataaagaaataggtgttgaaatgagaggtgttgtggatggagtagtgggggttgtttttttgttattaatttttttttttatggaagtgttttttgattataataaattatttgattttaggttaattaggttttgtaattgggtaattgagttggtttttttaggagtaggttttgagtttggttgttttttttaaggtaggttgattttgtaagatttgttagggttttttttatatatttttagttttattttggtttaggggaaaggttaggtattttgtgtttggggggattttggttttttaattttgtgtgtaagatttatttataatgtatattaggatttatattataaagtttataatgtatgtgtaggtttttgatggttttttttggaggttgtttttagggtgatgatatttggtattggaataggtgggatttggatgagtatagataatgtatttttatataatgtgaggtagtttttttttaaaaatatatttatatttatagttttttggttattttgtataagaattttgggtttatttaatggtattttaaaaaatatttgttgttttattttttaagtataaggtatagttggttttttttttgaaatttaaatgaggtaataaataggaggtgtattttttttttaggattttatttatttggaaatatttaaaggtagttgttttttagggtagaagattgttggatttaagggttgttaggttgaatatgattgtttttttttttttttagtttttggagggttattgggtgtttggggaaggaaggttttaagggtagtttttttgtggtttttagtaattattttggaatttttggtttgggtttgatttgggttaggttttgagttttttgaatataggtatgtgtgggtgaattggtatttatattatgggggtttgtagggtggttgggtgttgattaaatgggtataatataggaggtttttgggaggttggttgttttttgtgtttggtaagggtttaagagtttttgatgttgttgtgttgggttgggtgtttttgtagataaatttggatgttatgttttgttttggttgtttatttagtaaggtgttttttgtgtatattttatttggttgggggtagtgagtgggaattgttgggagagggggtggggaattattaattatttgtttttggatttagtgtgttggtttttggttttagttattttgtatttagttttttttttttatttttattgggtttttgtgaagatgtattattttgaatttttttgtggtattatttttgaattggaggggtagagaaggttttgttagttttttgtttgtagtaggaaggtgggtatggattagtagaagggaaagtggtgttgatttgtttttaaatatttttgtttttttgtttttaataaagttggttatagaggtgagtggtgtgggatggttgttttgagaaggttgtagttaggagtaaagttttggggtttataatggattgggtattttaaatggtgtaatttttggtatattttatttgtttttattttattttttgaattattttgtttttggtgtttatttttttttttatatttgtgtttttagtgtgttagtagttgtgtagtttttggttttgagtgtggggggtggggtgggggggtttagggtggtttgtgtggtgtggtttgatagaattttttgtgtgtggtggagggaggaggttaatgtataatgtatagtgtttggaagtttggttattagtggtttgttggtgatatagataaatgattgagagggaggagatttagtttgttttggagtttaaatagattagtgtggaggggaaatgttatgatttaaaagtgtgtgtttgtagatatttgtatatattttaatgatttttagtaggttatgtgttttagttttgtatttttttttttttaaaaggaggatgtgtttagaggagggaggatgaaggtagagtgagaggttttaatttagatttattagtagtttttgagagatgaaggaggggagaagtttagaaagtgaggtttggggaagttatatgatttaaggttaagtttagattttgtttttaaaataataatttaaaaaaagagttatttagttttttattttggattatattttgtgttgtattagaaaggtttgggggaaagaataaattttgttatttttgttttttttgggagtttatatttttgaattttttttttttattgatattttagagatttttttttttttggtttaatatattagtgttttttagtaattaaggtgagaagggggtggggataaagataagttaatttttttttttgttatgtaagtgtgagagataagataatgttaagttggggtaaagtggttgtttataatttttttttagtgattttgattggttattttttattttgtaaaaatgttttttttgaaaattggattaaaaaagaaaaagagaaaaagaaaagaaagaaagatttttatttggaagtgatatttaaaatttattttttttttattgataatttattttttattggtggggttttttaggaaaagttgtattttgattgtaggattttaggtttttttgtggggggtaggattattagtgtaattaggttgaataaaattagggatgtgtgatgaggatttattttgtatttaatttaagtttgtggttgggtttttttttttttagttattggttgatgtttgtgttttgttattgtatttagtgtttttaaattaaataggtagttatatttgggagggttatataattatgttaatatgaagtggttgttaatgtgaaataagaagaaatttttttgatatttataggtttttataaagggagagaaaggaaattatattttttagaatttgaaagtttttagttgaattggatttttggggagttttagaaatttttttttttgtataggaattttgtgaaggggtttttggaagattttgttgaggaaggttttggtattagattttatgattttagagtgttttgtaaattttttttggtttagtggttagttttagaatgtaaattttaaggtgggtgttttagattaagttgatttagtttttgtttatttttagtttataattttgaggtttttattttttgtttttgattgggttggtattgtggtgtttggtatatgttaagtttattgtttttaagttaggttgtaagatttaaaggttggggtttgttgtggatggattgtttttggggagttgaaattgtttagtggggaaatttttttttttgtttttttttgaaaagtttggttgtggtttaagttttgagtaagtgggtatttgttgatagttgggttttatgtaaggtttatatgtgttttattagttagtttgagttttttttgggtgagttgtttggtgtggttttaaggttgggtttaggtggggagagggtgtggggttgtagtgagttgtgggtggaggtgtgggttttgtggagtttggttaggtttggttttgtgtttttgggtttgtgggtaagttgagttggtggggtaggttgttttttggttggtgttggggtgttaagttgtgttttatgtgtttgttatattagtagtagtggtggtggtggtgaggagggggtgttgggaggtgtgtggttgtttttgtggggtttttggattttgtttttttgtttttttttgtgggggttgggttgagattattttgtggtttttattttagtgtaagttgaaagtggtgttgttagatgtagagaggtttttggggtgttgttttgagagttgtgtggtggtagtagttaggggagggtgttttttgtggttgttttgttgttgttgttgtagttatggggattggaagtttttgtgttgttttgagtggtttttgttggttttagggttgttttagatgagggttggttgtgtgttatttttgatttttttttgttttaggtgattatttgggttttgtggtattttggtgtaagttgagaggattttttttgtggtttgatgagatgtttttgtttttttgttattattataagtatgtttttttgtattgtttgtagttttgtagttgggattggaggggtgtggagttgttattttggttgggtaggaatatttgtttttaggttttgtagttgggtgtgtgttgttgtgagaggttgtttattgttgtgtgtagagattgtggaggagaaaatagggttttgaagtttagggttaggagtagttaagttttggttatttttattttttatttattgtaggtgatagagtgtgaagttagagggtttgttgggggtttgggtttttttttgaaggttgaagggttgttatttttgggatttggtttttggtttgaagaggttgtttataaaatagatggggtaaaatttgttttgggagtttttttagtgtttgtttttgttttttaaattagatatatttattttttttttagttttattttagtttttggtgggggatgggagtaggttatggtggtattggtattttatttgtttttttttatgtagggatgtagggttggttgtggggtttggattttgttattttatttagggaagggttaatggatgttttttgttttttttgtgtttggaggagatttggtggtggagttgatttgtaaggtttgttttgttttatttattttttatttttgttttattttttttgatttttttggtttagggtttggtttgggaaggtgttgttttgttagtgggagttgagtgagtgtatagagaaaagtttttttattttaatgagagtgtatatagtgttgtagtgaggaggatgattatttggtgggtggggggtgtgggtttgggttgtgggtggtgtgtgtggtggttttgtgggtttggagtttttgtttgtttggttgttaattgtatgttttttgttgttatggaggtaggtgggagttggtggttgagtttagtgttgatgatttggtgggtgatatggaaatatggtgtagtgttttttttttgtttgtgtttttgttttttgttttttttgtgtttttgttttttgttttgtatttttttttgtttgtgtggtttttgtagttttaatgttttgtttttggtttggtattattatgttagtagttgtttttttgtggttttgtgtgttttttttttttttgtttttggggtttatagaaaatgtttgtttttgttttgagtttttgttaaattaaatttgtggtggtaatggaaggtggtgtaggtggggaggggtttggggattttggtagtagttggttagagtgtggtggaaattttttttgttgggttttttgtttttttttattttttttttttaatatagagttgttggttttttgatgtttttttttttgtttttgagaggttttagtgttttaggaaggtttgggttatagagattgtgattaggggtgaagaatttagagtgtgtgtttgtgagttttgaggttttggtatttgatgattttgttttttgtagttttgatttatttttttttttttggttatttggggttttgtattagttggtgaagaaggggagggaagagaaagtgttttttttgtgtgtgtggtttttattttaaggatttgttggaatttgttatttttaattgtatagtttttttttgtataggatttagggtgaaagtggggaaatgttggatttagggggaaagggttgggttagaaatttagttttggaggttggattgtatttttttggtgggtttagttatatttggttggtatgtggggtggggtgatttagtagagtgggggatgtaagggttaggttttttggtttaggagatgttaaatgttttaattttggagtgagagagtaggaatttttgtttttatttaagtgtgtgtgttttttagtttgatgtgtaagttgtggttttttgtgttagagttgtttaggtggtaattttttaagtttgtaattaagtgaggtgttgttgtgttttttgttagtgttggttttgttagttgtatatggttttggtgttttggtttgaggttttgtgattagttataggtttgttttgttttttttttaatttgtttttgtaggtagtttggggatgtggttgatttggtggtgttggtagggagttattgtttgtggggtgggttttttgattagtgttagttttgttgtgtttgagttggtgtgggttttggggtgtgggtttggtgtttttttttttttatagttttttggttggggtggtggtgttttttttttttttgttttttttttgggtttgtgagatttatttgtgtggtgttatttgtataaaaataggataagtgtttttgtgtgtttatatgtgggaggtgaaatttttattgatgtgtttgtgtggagtttttgattgttggagtggtttgatttagggtgtttgtgttgttttttataagaaaggagagaaagttttttttaatttttttggtggtttgggtttttagaagtatgtttttttgtgtggttggaatggtttattatttgggttttaagtgtgttggatttatagtgagtaggttgagggttaggtgggaggtttattatgatttataaaattgggtggtttaattgttagttgttaatttatttatatgtggagttttttaatgttttttttgtttgggtttggttttttgagggtttgttttgatatagttagagttgttaagtgggagttaatttagtggttttttttttttgttggtagtgtggttttttttttttggtgatttttgtttttttggtttattgtgttgtttgttagtaattttttagtttggataaatagttgggagggtgttggttgtgtggagttagtaaattaattattaatttttaagtgaggtttggattaggggagggagtggtggttagagttgagtttgtgaggtgagtgtaaagtttttattggggttaggagttatttatgtgttaatgaattgggtgtgtgaaggtgggttttgttatggttttttgggtttttttagaagtttttgtttgttgggttttttaagtttgtattttgtttggttaggtaggttgtgttatagtgttgtttttgggagagtttgaatattaatgagttgttttgggttttagtggtttgttttttataggagagtgttttgtgtttgggtaagttttttggatttggttgggttttttttggtttaggtttgttaaattaaattgattgtattttgtattgattaatttttttgtggtattttttttttttagtttatggtggagttggtatgtagggggttaaaagttttggtttgttttggttttttggttgtgaggagaaaatgttgattaaagtgtttaaggggaaggtaatatatgtatatttggttttgggttgaaggaggttgattggagatggtttttgagttatttgttttgatttgttttttatatttttgggaatgtggtggtggtggtggttttggtttgtatgatttgtttggtggagtgttgtgttgttgggttgggagggtggtggggaggaggagagatgagggggtgggaggtgaatttgggttgtgtgttaagaggtttggagttgtagattagttattgtttggttttgtgtttttgggtgtgtttgggaattgggagggtaggtgttggttttgtttagttgggttttttggtttttggtgtgggtgtttttatttttatttttgtgtgtttttggtgtggttggtttgatttttggggatttgtgtagttgagatttatttgttaggttaagggtaggatagaaattttgtaagtggagttttgtttgtgaataggaaatttttttttgatgaggtgttgttttttttttatgttgggttttaaaataaaattttagagtgggtggttaggtatttagttttgtttgttatggttggtgatttttgttttttggttttggttttgggtggtggagttaagttaatagagttggtggatggatttggtgttggttttgtggagggtgttaggttgttattttttggggtttggatggggttggtgggggtgtggagttttggagtttttgtgtttttttaggttttatagttattgagtggttttgtggagttgtttgaggttgttgggttagtggttttttggagggtgtggggggtggggaggttgtgtggtgttgttgatttggtgaattttgttgtgggagtttgggagggttgtgagtttggtttggtaaagtttttgtggaaattttatgttttgaaatttttgtggtgttgtagaaggagggggagaggggagtgtgggaagtgtgtgggggtggtttgtatttgtttttttttgttggggagtgggttttgtggttttttgggttttatgggaaagttggagggtggggatggttgggtttttgggtttg

SEQ ID NO: 455 - DNA, 17219 bp, Artificial Sequence
  Description of Artificial Sequence: Synthetic polynucleotide
tgggtttggggatttggttgtttttgttttttagtttttttatgaggtttggggggttgtggaatttattttttggtggggagaggtgggtgtagattgtttttgtgtgttttttgtgtttttttttttttttttttttgtgatgttgtaggagttttaaaatatggagtttttataggaattttgttaggttgagtttgtagtttttttgggtttttgtagtgggatttgttgagttggtggtgttgtgtggtttttttgttttttatgttttttggggagttgttgatttggtggttttgggtagttttgtaaaattgtttggtggttgtagaatttggggaggtgtgggggttttggggttttgtatttttgttgattttgtttgggttttggagggtggtagtttggtgttttttgtggggttggtgttgagtttgtttgttggttttgttggtttggttttgttgtttggggttggggttgaggagtggaggttgttggttatggtgagtgaggttgggtatttggttgtttgttttggagttttgttttgaagtttggtgtgggggaggggtagtattttattaaggagaaattttttgtttgtaagtaagattttgtttgtagagtttttgttttgtttttgatttgataagtggattttggttgtgtgggtttttgagagttgagttagttgtgttaggagtgtgtgggggtgggggtgggggtatttgtgttgaggattggggagtttggttgagtggggttgatgtttgtttttttggtttttgggtgtatttgggagtgtagagttgagtggtgattaatttgtggttttgggttttttggtgtgtagtttgggtttgttttttgtttttttgtttttttttttttttgttgtttttttagtttagtagtgtagtgttttgttgagtgaattgtgtgggttagggttgttgttgttgttgtgtttttgggagtgtgggaagtgggttgaggtgggtggtttgggagttgtttttagttggttttttttgatttgggattgaatgtgtatgtgttattttttttttaagtattttgattagtgttttttttttgtagttgaggagttagagtgaattggggtttttaattttttgtgtgttggttttattgtgggttgagggaagagggtgttgtagggagattggttgatatagggtgtgattagtttggtttagtaagtttgagttaggaggagtttggttggatttgaggagtttgtttaagtgtgggatgtttttttgtggagagtaggttgttgaggtttgaggtgatttgttaatgtttaagtttttttaggggtagtgttgtaatgtgatttgtttggttaggtaaggtgtgggtttgaaaggtttggtgggtggaggtttttggaggggtttgggaggttatggtgggatttgtttttatgtatttggtttgttggtgtgtgggtggtttttaattttggtggaggttttgtgtttgttttgtggatttggttttggttgttgtttttttttttggtttaggttttgtttgggagttaatgattgatttattggttttgtgtggttggtgtttttttagttatttgtttaagttgaggagttgttggtgagtagtgtagtaggttaagagagtgggggttgttggggaagggaagttatgttgttgatgggaaggagaggttattagattagtttttatttggtggttttagttgtgttggggtaaatttttaggaagttgggtttgggtgaagggagtattgggaagttttatatgtaaatgggttggtagttggtgattaggttgtttgattttatgagttataatgggttttttgtttggtttttaatttgtttgttgtggatttggtgtgtttggggtttaagtggtggattattttggttgtgtagagggatatgtttttgggggtttaggttgttgaaggagttgagaaggattttttttttttttttgtagaaggtaatataaatattttaaattaaattgttttgataattgaaggttttatatagatatattaataaggattttgttttttgtgtatgaatgtatagaaatatttgttttatttttatgtaaatgatattatataaatagattttgtaggtttgggagaggggtgggaggaggaggggtgttgttattttagttagggggttgtgagaggggaggggtgttaaatttgtattttagggtttgtgttggtttgggtgtagtggggttggtattggttaggaggtttgttttgtgggtagtggttttttgttagtgttgttaagttggttgtgtttttaggttgtttgtagaggtggattagggaaggagtgaagtgagtttgtgattaattgtggggttttggattggagtattaaggttatgtgtgattgataggattgatattagtagaggatatggtgatgttttgtttaattgtaggtttaaaaaattgttgtttgagtagttttggtgtggagagttatggtttgtgtgttgagttagggagtgtgtgtgtttgggtgggggtgggggtttttgtttttttgttttaaggttggaatgtttggtgttttttggattgagggatttggtttttgtgttttttattttgttgggttgttttgttttgtgtgttgattaagtgtggttgagtttgttaggagagtatgatttagtttttagggttaggtttttgatttgattttttttttttaaatttgatgtttttttgtttttgttttagattttatatgggagggggttgtgtagttgggggtgatagattttaataaatttttaaaataaaaattatatgtatgaaagaaatatttttttttttttttttttttttattgattgatataaagttttgaatgattaaagggaaagaggtaagttggggttgtagggagtaaggttattgagtgttaaaattttggggtttatagatatgtattttgagttttttatttttggttatagtttttgtggtttagatttttttggagtattggggttttttgggggtgaagggagaagtgttgggaggttggtggttttgtgttggggagggggagtgggagggagtggagaatttagtgagagaagtttttattatgttttggttggttattgttaaaatttttggatttttttttgtttgtattgttttttgttgttattataagtttggtttaatgagagtttgggataaaagtaaatgttttttatagattttgaaaataaaggggaaagagatgtgtggggttgtggagaagtggttgttagtgtaatggtgttaggttgaaagtagagtattaaaattgtaaaagttgtgtgggtgggaggaagtgtgaggtgggaggtgggagtgtggggagggtgggaggtgggagtgtgggtgggggaggggtgttgtgttatgtttttgtgttatttgttgagttgttggtgttgggtttggttgttggtttttgtttgtttttgtaatagtagaaagtgtgtgattagtagttagataggtggggattttgggtttgtggggttgttgtatatgttgtttgtggtttgagtttgtgttttttgtttgttgggtaattattttttttgttgtagtgttgtgtgtatttttattagagtagggaggtttttttttgtgtatttgtttggtttttgttggtaaaataatgtttttttgggttgggttttgggttaggagagttggggagggtgggatggaggtggggggtgggtgaggtagggtaagttttgtaggttagttttgttgttggattttttttggatatggaggagatggggagtgtttattggtttttttttaggtggagtggtaaagtttgagttttgtagttgattttatgtttttatgtggaggggggtgggtggagtattggtgttgttatgatttatttttgttttttgttggaggttagagtagggttgagggggagatgagtgtgtttggtttggagagtgggggtggatattgggaaggtttttaaaataggttttgttttatttgttttatgaatgatttttttaggttagaagttggattttaggggtggtggttttttgatttttgaaaggagatttgggtttttagtaggttttttggttttgtgttttgttgtttgtagtgggtgggagatgggggtggttgaggtttggttgtttttggttttgagttttggagttttatttttttttttgtgatttttgtatataatagtaggtagttttttatagtagtatgtgtttagttgtagggtttgggagtaggtgtttttgtttggttggagtggtggttttgtgtttttttggttttagttgtggagttgtgagtggtgtgggggggtgtgtttatggtggtagtagagggatagggatattttattggattgtaggaagggtttttttggtttatattgggatattgtagggtttgggtggttgtttggggtgaggagggattaggggtgatgtgtggttagtttttgtttggaatagttttggggttagtggaggttgtttggggtggtgtgagggtttttggtttttgtgattgtggtggtggtggtggggtggttgtgaggagtatttttttttggttgttgttgttgtgtggtttttggaatggtgttttaggagtttttttgtgtttggtagtgttgtttttggtttgtgttgggatgggggttgtagggtggttttggtttagtttttatggggaggggtggggaggtggggtttggagattttgtgggaatggttgtgtgttttttagtattttttttttgttgttgttgttgttgttgttgatatggtgggtatgtgaagtgtagtttggtgttttggtgttagttagggagtggtttgttttgttgatttagtttatttgtgggtttaggaatgtggaattgagtttggttgggttttgtggagtttgtatttttgtttgtagtttgttgtggttttgtattttttttttgtttgagtttggttttggggttgtgttaggtggtttgtttgaggggaatttgggttgattaatgggatgtgtgtgggttttatgtgaggtttggttgttagtggatatttgtttgtttggagtttagattgtggttaagttttttggggaagggtgagaggaggggtttttttgttgggtggttttagttttttagggataatttgtttgtggtaggttttaatttttggattttgtagtttggtttggagatggtagatttggtatgtgttggatgttatggtgttgatttggttgggggtagggggtgggagttttggggttgtgagttgggggtgggtagaggttaggttagtttggtttggggtgtttgttttgaggtttgtattttggggttagttattgggttggggggaatttgtagggtgttttgaggttgtggagtttgatattaaaattttttttgataaagttttttggaaatttttttgtgaaatttttgtgtggaaagaaggatttttaaaattttttgagggtttggtttggttgggagtttttgggttttagggagtgtgattttttttttttttttttataggggtttataaatattagaagagtttttttttattttgtattaataattattttatgttgatatagttatatgatttttttaagtataattatttgtttagtttgaaggtattgagtgtgatggtgaaatataaatattgattagtaattaagagaaggaaaatttagttgtgagtttgggttggatataggataaatttttattatgtatttttggttttatttagtttaattgtattagtaattttgttttttgtgagaaagtttgaaattttgtagttgaggtgtgattttttttggggagttttgttaatggggggtgggttgttagtggaggggaggtgggttttaaatgttatttttaaatgaaaatttttttttttttttttttttttttttttttttttgatttagtttttgaaaagagtatttttgtgagataagaagtgattgattaaaattgttaaggggaggttgtaagtagttgttttgttttagtttagtgttattttattttttatatttgtatggtggaaaaaaaaattggtttatttttatttttattttttttttgttttaattgttaaaaaatattagtgtgttaaattgggaggaaggaggtttttggagtgttagtggaaaaggaagatttaaaaatgtgggtttttgggggaagtaagggtggtagaatttatttttttttttaggtttttttggtataatatagggtgtagtttagggtggaaggttgggtggttttttttttaaattattattttaagaataaaatttgggtttggttttgggttgtgtggtttttttaggttttgttttttgaatttttttttttttttattttttaaaagttgttggtgggtttgggttgaggttttttattttgtttttatttttttttttttagatatattttttttttggggagggggggatgtaaggttaggatatatagtttgttggaaattattaaaatatatgtgagtgtttgtaaatatatatttttaaattatggtgttttttttttatgttggtttatttaaattttagagtgagttggatttttttttttttagttgtttgtttgtgttattgataggttgttaatggttgggtttttaggtgttgtgtattatgtattagttttttttttttgttgtatatagaaggttttgttaggttgtattatataaattattttgagtttttttattttattttttgtatttagggttgggggttgtgtggttgttaatgtgttgggaatgtaggtatggagaggaggatgagtattgagagtagagtggtttggaaggtggaatgggagtgggtgaaatgtgttgaagattatattgtttggaatgtttagtttgttgtgagttttaaagttttgtttttggttgtgatttttttgaggtaattattttgtgttatttatttttgtgattgattttgttgggggtgggagggtagaggtatttagagatagattagtattgtttttttttttgttggtttgtatttatttttttgttgtaggtgaggggttggtagagttttttttatttttttagtttgggagtggtattgtgaaggggtttggggtggtgtgtttttgtagggatttggtgggagtggaggagggaagttggatataaaatggttggggttggaggttggtatattgggtttgaaggtgagtagttggtggttttttgtttttttttttggtggtttttatttattgtttttagttgggtaaaatatgtgtagaaggtgttttgttaaataagtagttgaggtgggatgtggtgtttgggtttatttgtaggagtatttggtttagtgtggtggtgttgagggtttttaagtttttgttgagtgtaagaggtggttagttttttagaagttttttgtattatgtttatttggttgatatttaattattttgtgggtttttgtagtgtagatgttagtttatttatatgtgtttgtgtttggggagtttagggtttgatttaaattgagtttagattagaaattttaagatggttgttaggaattatggagaggttgtttttagggttttttttttttaaatatttaataattttttaaaggttaggaagaagaaagaatagttatgtttagtttggtgatttttaagtttagtagttttttgttttgggaggtagttatttttagatgtttttagatgagtgaaattttgggaggaggatgtgttttttgtttgttattttgtttgagttttagaggggaagttagttgtgttttgtgtttggaggatggggtagtggatgttttttaaagtgttattggataagtttagagtttttgtataaagtgattagaagattataagtgtgggtgtgtttttaaagaaaggttattttatattatgtaaaaatatattatttgtatttatttgagttttatttgttttagtattaagtgttattgttttgagaatagtttttgaggaggattattggaagtttatatatatgttataagttttatgatgtggattttagtatatgttataaataaattttgtatataaggttagaaggttagggtttttttaaatataggatgtttggttttttttttaggttagggtggagttggaggtgtgtgggagaggttttagtgggttttgtagagttaatttgttttgagaagggtagttaggtttaaggtttgtttttagaagggttagtttgattgtttagttgtagggtttggttagtttgaggttgagtggtttgttataattaggagatatttttatgggaagggagattggtggtggaggggtagtttttgttgttttatttgtagtattttttattttggtatttatttttttatttttttgtgggttgtatggtttttttttttatgtatttttttgtttatttttttttttttttttgtttttattgaaattttttttttgttgagtgttgggtatagtagtttgatttttgggttagtttttgaagggtttgtgggagggtaggagaggagggggtaggagaagggttaaattgttggtatttattgtaggttttgtggtatttttagttttttgagtttttttttaagtgaggatataagatgggattgttttttgatagttttttgtttgttttttttagaataattggaattaattgggttaataggtgtaattttttttttttttttttgttttatagtgttttgggaaaattttatattttaatttttagtgagttatgaattttttttattatttatgttttttaggatttttttaataagatatttttgaaattttatggagttgaaaaatgtatttttaggagatggaggagaaattttttaattttattagtttattgtggaggtaagatttttagaaaaggtgggggaggatgttgtaaattatgttaaaggtgaatttattggtttgtttgtttttagtattaaattttttttttagttagttttttttttggtttttttgtatttatagtatttttattatttttgtttattttaattttaggattttttttttttttttttttttttttttttttttttgagatggagttttgtttttgttgtttaggttggagtgtaatggtgtgattttggtttattgtaatttttgttttttgggtttaagtgatttttttggtttagttttttgaattttaggatttttaaagttagataaataggtttttttgttagtagttttgggaggttgtaagattttgagaggttgtaggttttgagtttggtttttggattttttaaaagttttggatgtttatatgtgattttgaattttgagaaaagtttgtgtttgggggtagagttggggagatgaggggaggggatagaaggtggttgggtgttgggttagggtttttgtggtttggtttaattgagttggaagagtttggtatggttttatattggtttaggttagtttttttgtttagtttgtagtagtagagtggtttttttgtttggaattatgtttagagtttttttataaatatttagttttagtttttttggttatttttgatttgttttgaataaaaggagttgttttaaaaagaaatgttgttataatatataattagaggttttttttttagttgtgtttgtaatttgtatgtgtttaatttaataatttttaatgtttggttttaaaatgtttttataaaaaatagttttatagtataatagtttaggtgtttttttgtttgttattggagattaaaaaaatgtgtgggttggtttgtagagatatttatttttagaaagattaggaagaaaaaagtgtgtattttattttgtaggtgttggttttggaagtgtttgtggtttagtttggttgggtattgtttgtgggggtatttgtttgtttgttttttgtattagttgttataagtagttttggagtatgaagatttaattttgttgaagttttgggttttaaatggtagagatgttttatttttgttttgagaagggttgtttttataattatgtgttgagaattaaaatagaatgaataaaattgtatttaatattagttttatagttagtagtgagtttaatttttaaaagggaaaatatttgttagttagagttgattttggttttgattttgatttagtaattaatttgagatgtttttgattatttttggtatggggatattttaggatattttaaaaattttttgtgtggatttataagttatttttattttagatttatgttttatggagtttgtattattttgtttttaggtagaaagagatattttattttttttttagtataaaaagattttagtgggtagttgaatggggttattattggttgtgaagtttgggtttgtagtttgggtgtggttagtttggaatatttttttttttatttttatttttttttgttagttttattaattagggttttttggtttgtttttgaggttttgtgttttggggaggttggaattttgtttttttgttttttttttttttttgtttgtttttgttttttttttgtgtttagagttgtgttgggtgtgttggagaagtttaatatgtgttaattgaattgaattgttgtgggtgtaggttgtatgttgttgttaagtattgattagtatgatgttattgagtggaaatttatggggtgaatggtgtaagttaaaagttgttttttgttaaggaaaataaaatgtgggagataattttttaatgttggggtgaggggtttgggtagtttttttaattattagaggtatagattgtgaaaatgtttgagaattgggagaaatataggtggatttttgtttgttgattgttttttatatgttttttggtgtttttatgggttgtttttttttttttttatttttaaataatttttatataattgaaatgtttggggaatttgggtgtggagtttaggtggaatggttattgttgtttggggtggtgtttttaggtagtttttaatattgaaatgggaaagggtttttttgggaggaaggggtaaattggggtgggggtgagtatgggagtatataggttatgttttgttgggttttggaggggatgaggttgggagagtgtagtgttggtggtaagaggtggtggtagtggttgttgttgttggggtttgatagttttggttgagtggagtgtgaggtgttttatggtaattgtggttttttattggttttttgggtagtgaggggagttttggtgtgtggttgggagagttgtttttgttgtttttatttttttggttttggttttgttggtagtttttgttgttgttgttgtttaagttggtttttggtttgtttaggatgtgtgtttgggttgggtgtgtgtagttaatttggtttgagttggggaggggaggttgggggatgaggagggggggtgttatttaagtggtttggggtttggatttagagaggttaaaatgtgttgggttgtgtattgatgatggttggggaaatttgggtaaattttttttggggaattattttttttgaaattttgttgtggaggtgttgtagtggagggtgagtggagattggtggagtttaaatttgtgagagttggaggtggtggtgggtgggtggttgttgtttgagtgttgtgtttgtggggggaggggaggtggttgttgggagggagggaggtagggtgggtgggagggaggatgggtggagggagggggaggaggaagaggagggaattagggaggggggatgtgttgggattgtggtgtgtggtggtagatggagtttgggtttttagtggtaaggtgaggtagagttgtgttttttgttgaatgtgggttgagtttggtggttgtgggggagatgtgtaggagtttagattgtgattgagagtgggagttaggtgggtggtggtggtggagggggagtttgtgagttgttgggtggagagtttaagttgtgttgttgttgtgtagggatgatttggttaatatttatatatatttatatatatttagtttgagtgggtgtttgtggtgaattgttaatatggtgttggggtttttgtttgagtgtgggtggtggtggtagtgtgggagttgttgagtttggttaagtttagtttagttgtgggagtttggaggattgtatggggttgttgttatttgtttggaggttttgagtttgttttgttttgtttttatttggtttagagtttattttttggtggggttgattttgagggtagttggttgttagtagatggtgagggagttgagtgagtgtggtgttgtgagtgggttgtgggtagttggggattgtaaattttgttgtttgttgtgtttttttggtttggttttttttttgtttgttaatgttgttaattttttttattttttatatttttttttatttatttaattgttttttgtttttttttgttgttttgagtttgtttgggggaaaattttaaagagttggattgtaggttttttgtttatttttttattggggattttaggttagtgtttggaatattttttttttgggagattgtggatgggtgggtgggtgggtgtgttgagggttgtagttggtttttttttttggggtttttttttgtagtgtattttgtgaagtttttgttttgtgtttttttttggttgtttggtttgtttttgtttttattttatagttatgttatttaaaatgtagttaatttaagtggttttgtgtgggtattagggagggagggggtgtggttgggggtttggtgttttttggtgggttaggaggagagtagggagtttgtagagtggaagtttgtagtttgtgtgtgtttgtgtgtgggagtgtggttgttgttgagtgttgtgagttgggtggaggggggggaggtgggttggaagttgggaagttgggtttggtgttagtttgtgagtaggaaggggagggtagtgggttgttgtttgtttttttttttgatttgggaaagaattgtaaaaatttttagttgttgttattgttgttttgttttgtttttttgggggttggttgtttttttaagtggaatgttggtgtgtgtgtgtgtgagggtgtgtggtgagtgttttgggttgagttgagtttgatttgttgttgttgttgtgtaatttgggaggggagttttgtttttttttggtttgttttaaagtatgaattatgtggattaaaaaaaaaaattattaagaaattgagtagagtaaggggttttgatttggtttgtttgttagttaggttagatgttttgttttgtaaatgtttttttaagattataatttgtgattttttttttgtttttttttttttttttttttttgatgtttagtgtaggttttaagttatgagtttttaggggtgggtgtagaatgtgtttgtgtgggggtagtgttgtggagggagggtgggggtgggtgagatttgggttttttgttgggtaatggggagtttggtgggtagttttgatgggtgtgtgaaagtttgtggttggaggaagttggttttatttggagggtgtgtggtaaggaggttgtaggtgaagaggaatttgtgtattggggtaagatttttggttaaggtggggagggtgaggtgttgtggggtttgtgtttggagttggtgggtggttgtgttgtagagtttttgttaatttgggggtttgtggtggtggtgatgagtgtttgttgtttatggagagagttttggggtattgtgtgtggagtagggtggttgaagttatgtgtggttttggtgggttttttgttgtttgtatgtttgagtgggttttttttggggttttggagatggatgagtttggtagtgtgtaggttgtggttgggtgaggtgtaatttgttgttaatgaattttttttagaaagtttgtgatttttagttagaggttgtgagtgtttgtgtgttagggtgtgtgttgttggtgtttggagggtgggggtggggggaatggaagagtgaagaaggaaggaggagggttatgtgtatttagaaataaattttaaaaagaaattaatgtgttttaaataggtatttgtatagttttgttgtgtttagattagatagtttggggttttagttgtgttttttttttttttttttgttttgagaagatgttagaggaggggtagtgtggtatttggttttaggggtagttttttggagaaagatttttaaaatggtttgggagtaaagattaggaggaaatggtttattttagaaggtggtgggtggtgagtgtagatagatttgggtatttttggttatttgatattttttgtggtattggaaatggatattgtgggttgaaattaatttttatgaagtgttgggtttggttttgttaatagaattgtttgtgtggaaggtattttaattgttagttttaaagatttttgtatgtggatatttagggaatatgtttgttttttgattttgtttattttttttttgatttgttatttggtgtgggttttgtagtgttggtttttgtgtttattttgggtagggttttagtgtgtagagtggagtggggggggaaggtgatgattaatatgttatttaggtttaatttgaggttggtttttagtgtgtgggtatatattgttatgtatattaattgttttggggtgtttaggggagtgtgtgggttttgggtagtaggtgtttggttggtaagttgtggttggggtttggttggttttagtgttgttttttgaggtgttgttattagtaggtgattgagagttaattaggaagtgttttttggattaatgggttgtatagtttattagtgattttttttagttttttgtagggttgttttggtttttgttttttatataggttggggttttgttgtttaggttgtggggagtgttgttgggaagtggggaggggttggtagtgagggatggtggggaagtgagtgtaattttgtggggtggtgtgttgtgtgtggtgttttgaggtttgtgtagtttgttttttttttttgtttgtggttgtttttattgtgtttttaatttgtttttgtttgtgttgttgtttggttgtttttttttgttttttgtgtttattttttgttttttaagtatgatgtttgtgttttttgtttagtttaggattagataagataaaaataggattgtttagtgtgtggagttgtgattgtgttttggtagttgggttggtgggagtgtggggggttggagttggagaggatttgtggtgtgtttggagtggttagtgtttgtgggttttttatttttattttgtaggtattgttatgttttttgggttttgtttgttgtgaattgtgtgggttgggggatttgggtagggtttttgtgtttttgtgggtgttgttggtgtgttggtgatagattggtttagataggtatgtaggtttttttttggttgaaggattggaggggggggaggtgtggagatggtagtagattttgtgagttgtgagtgagtgagttagtttttgggtttaggagttgggtggagggaaggttgtgggggttttttttaattttttaaaggttgtggtggggtagtgtaatagggaaaggggggtaaagagtttagtggaaatttttggaggtagagtagtttgtagtggggaggagttgtgagtttgggtttagggttttttttttttttatgtgtgtatggttatattttggtgtattgggtttgatttttttataaattaaatgtagttgttagatgatttagtttgattaggtattttttagttggggagttgtgaatatatataatgaatatttttattttaaaaattgagtttggaagatagatgtagatttaatgtttttaaagagaatttatgtgggtgtttaaggatgggaaggtttgtatatagttgtagttgggtggggtttttgattatgattgttgtagattaaggatttgagtttgaaatgttttgttagtatgtataggtatgtattgaagagagtaaagtggtttttgagttgtttttatataaatagatatatttttaattaggaatttgtgaggagttagatatgtgtaaggagatagtttttaaagaggagttggatattgatgtgttgtgagatttattgtttgtgtgtgtatatatatggttaatattaaattggtttaaaattttaatatatttttgtagatatttatttagttttttttttagtttgaaatgggtggatgggttattttatatataaataatttattattaatattttagttttttttttttttttttttttttttttaagagtttgtgattttaagggattttttgtttatatttaaattgtaaatttatattggtttggtttgggaaagagttatattataggtaaagtaaaaagaatggaagtagtatgaatgtttagattaagatgtgtgtttgaatgatatgtgttgagataaattaagatatttgggttttgttgtttaaatggaataagagatatataagagataaagaattggttaaggggaatgtaaatatgggtatgtaaatatagagatgtatagtgatattttgagagaaaaattttagattttgttgagttggaaattggggtagaatttttgtaagtgtgttttagagataatagtttatttaaaggtgtgaagagggttatttggaaatataaaaagtatttatatgtatatatttatgtttagatatataggttgaatgataaatattttttaatgtttgatgaagatttttttgttgagtgagtgagattgatttgggtatagaagagtgggttatataattatatttatatatttatttatagggaaataatgtgtttttggtttgaaggaaattgagggttatgttagtagtttaaaggatggatggtgtgtagtgaa

SEQ ID NO: 456 - DNA, 2264 bp, Artificial Sequence
  Description of Artificial Sequence: Synthetic polynucleotide
gattagtttggttaatatggtaaaattttgtttttattaaaaatataaaaattagttgggtatggtggtgtgtgtttgtaattttagttatttgggaggttgaagtaggagaattgtgtgaatttaggaggtgtaggttgtagtgggttagagattgtgttattgttttttagtttgggtgatttttaggttaaattgtgtttgatataaaagtttatattgatatagattttttgatataaaagtttatttttttttgataggtttgattgatttttttttttataaagataaaagttgttttaatatttaagaggaattatattgtggtgaaaggggtgttatgaattttgggttttagtttttgtattatgttttagtgtgatattggattttaatttttttattattaaagttaatgggttattataatttttttagaagtagttttaatttttaaagataagattaaaaatattaatagtgtttgagtttttggaattgaattagtattggagttttgtttggttgttttttttttttttttttaagattaatgatttggagggaattttggtgagtttgagtttttgtaatttgttagggattaattagaagtttggtgagtagttagtaatataatttttgggtatttttttagttttattagtatatttttttttattttgtttttttttgttgtagttttttttaagtttatatttgtgtttttgttagttttttttgggattttattggtgttggtagtttttgggtttttgggtatagtggttgttttatttgatttttttgtttttttatttttgttggagggtgatttgtgggtattgtttattatggataggattggaggggagaggagattgtggagatgtttgaggtagaagtttggaaatttgagttgtataggttaggattttattttttgttgttgtgtagtgatgatattatttttattgtttttttgaggggttattttgaggtgtgtgtagaggattagaggatttattttaattttggtttggtgatagtgggaagtgggaaaattggatgtaaagagtttagattatggattttttttgttaggaaattagtatttgtgaaggagtgtagttttgtttattaaataatttttttttttttgtttgtttaaaaatgtaatgttagttaatttttttgttaattttttagagtaaagttgggggattgggagaaaatttagttttgttgtatggtggtgttgtggaatgaggttttttgggattggtaaatttttaggtaaggatttaattttgtatattttaattggtttgaaattgtgggtttgtgtgtatatagaattgttagtattttttttttattttgtaagtattttaataataaaaagttatatagtttgagtagaatttatttaatttatttatttatttataattattgattgtttattttgatttagaaatagtgttagtattagggaataaaatatatatagtttttatttaattaaatgattttttttagtttgttagtattgaagattgaggtttgtttttataagtttgatatttttttattagtttggttaattttattaaaattaagaggaaagtttaaagagaggaaggtgttttttttgaatgttttattttaatgaattagtttatgtattgggaggatgaagtggtgaggatatttttgttttaaaatttttttttttttttttattgagatatgagggggagggtgttttatttatttgggtatgattaggtttttgtatttattatatatttaatttatgtgtgttgaaagaatggatttggaaatgtaggtgtgtgttatatttatttttttgtttttatgttgtttggatgaattattgtattttttgttttaggagtttttaaaatttttggggaaggagtgtattttgggaggtgtgtataggtgggtttgtttgtttttttttatttgtataatgggggtttataaggtgttgtttttatgttttgagaggtgtgttttggtatagtaaagtttatttgtgttggtttgtggagttttgtttagttaggtgagttagggggtggggtgtgggggtgtggtgatgtgtgatgttggattttggaagtgatgtgtttgtggggaaaaggtagggagggggtggtgtttttagttggtttggggggtgtgttgtttggagatggaaagtttgggagtttgagtaggtttggttgtag

SEQ ID NO: 457 - DNA, 2264 bp, Artificial Sequence
  Description of Artificial Sequence: Synthetic polynucleotide
ttgtagttgagtttgtttgggtttttaaattttttgtttttgggtaatgtattttttaaattggttggggatattattttttttttgttttttttttatgagtgtgttatttttgggatttggtgttatgtgttattgtgtttttgtgttttgttttttagtttatttagttgggtggggttttgtggattagtgtaggtggattttgttgtgttgagatatgttttttggggtatggggatagtgttttgtgggtttttattatgtaggtggaaagggataaataggtttatttgtatgtgttttttgaagtgtgttttttttttaaaggttttgggagtttttgggataggaaatatggtaatttgtttaggtagtgtagaaataaagagataaatgtaatgtgtatttatatttttaagtttatttttttagtatgtataaattaaatatgtaataggtgtggggatttagttatatttaggtgaataaaatgtttttttttttgtattttaatgagggaagagaagaaaattttaaaatagaaatatttttattattttatttttttagtatgtgaattagtttattaaagtgaaatgtttaaaggagatatttttttttttttaggttttttttttagttttaatgagattaattaaattgatagaaaagtgttagatttgtaaaaataaattttaatttttagtattggtgaattgaaaaaaattatttaattgggtagaaattatgtgtgttttgttttttggtattagtattgtttttaaattgaagtaggtagttaatagttgtggatgaataaatgaattggataaattttgtttgagttatatgattttttgttgttaaggtgtttgtggaatggaggggaaatgttagtaattttatgtatatataggtttgtggttttgggttagttgaaatatataaggttgagtttttgtttgaaagtttattagttttggggagttttattttatgatattgttatataatggaattgagtttttttttagttttttaattttattttgaggggttaatgaagggattaattgatattgtatttttagataggtgaaaaggaaaaagttatttagtaaataaaattgtgtttttttataagtgttggttttttagtgaggaggatttatagtttgagttttttatgtttaatttttttgttttttattgttgttaaattaaagttaaaatgagttttttagttttttatgtgtgttttaaaatgattttttaggagagtggtaggggtgatgttattgttgtgtgatgataggaagtaagattttggtttgtgtagtttgggtttttgagtttttgttttaggtatttttgtgatttttttttttttttaattttatttgtgatggatgatgtttatgagttgttttttgataaaggtggagagataggggagttggatgagatggttgttgtgtttggggatttgggggttattgatattgatggaattttagaggaaattgatggagatgtagatgtggatttgaaagaagttgtagtggaggaaggtgaggtaggaagagatgtattgatgaggttgaaggaatatttagagattgtgttattggttgtttgttgggtttttggttagtttttaataagttatgagaatttgaatttattagaattttttttagattgttaattttgagggggaagagaggggatgattaaataaaattttagtgttggtttggttttagaggtttaagtattgttaatatttttagttttgtttttagggattaaagttatttttaagggagttataatagtttgttggttttggtggtgaggaaattgggatttaatgttatattgagatgtagtgtaagagttaaaatttaggatttgtagtattttttttattgtaatatggttttttttagatgttaagataatttttgtttttataggaaggagggttgattagatttgttaaagggagatagatttttatattgaaaagtttatattgatatagatttttatattgaatatgatttaatttgagagttgtttgggttggagaataatggtgtgatttttggtttattgtaatttgtgttttttgggtttatgtgatttttttgttttagttttttgagtagttaggattataggtgtatattattatgtttagttaatttttgtatttttagtagagatggggttttattatgttggttaggttggtt

SEQ ID NO: 458 - DNA, 3104 bp, Artificial Sequence
  Description of Artificial Sequence: Synthetic polynucleotide
gtgggtgttgttgagtatggggaggtgttgaaatagttttggtgtgttgatttaagttttgattggtagagttatttggtgattgatagggggtttttatggtgtttgtgttgttaatttgtttattttaatagtggagttagtttgtttgttggtgtgtttgagttgagttgagtttgaattttaagttgtggagttagtattttttttagttggggttgtttgtttttggttgttgagttattgttgttatttggtagtgtgttttgttgttttaatttgttttattaataagtgtttggtatatttagttaggtttgtgggtatttgttgtgtgttttgttttgggtttagtgtttttgttgttgttggtattgttttgatgttttagttgtttattttgaattttagtttttagtaagtggttggggtatgtgagattttggaagagagtggtgatgtggagtgtttgggttgttttttttggttgttgtttgtggtttttgtggtttgtgaggtttttaataagaatgagttggtgttatgtgtatgagttattgtggttttttatggtggtaattattgtgagttttattatattttggaaaattataagtttattaaggagttgtatgttaagttgtaggtgttgtggtttgaagtatattattaggaggttgagaagttgtgtggaagatttttgggatttgtggataagtattgagtaaggaagaagtttttgttgttgtgtattatttgggatggtgaatagaagatatattgttttaaggagtgtatgtggtatttgttatgtgagtggtatttgtaggatttatattttaattttagtaaaaaatgtgagtttgtttaggtaattggattgatttttatgtaggtgggtaattggtttaaaaattgttgataaagggattgagtggttgtagttaagaataggttggtatttagaggtttttgtgttttgagtgtattggggaggaggtgggtggaggtatttttggtgtttttatttagtttttggtgattttaatttagtaggagttgggagtgtggtttgttttgggttaagagttttgtgttttgggtttttggttgggagtttttttgttggttttgtttttttatttgttggttttttatgtttgtgggtagttgtagtagttggttttggttattaaattaaggttttattgggatggagaggggaagagaaataaaaaattaaaattttataaatagttagggattttaagatttaaagttaatttttgttagtttgggtataggtttttattattaattgaagtttggtttattagtaatgtgttggttttatgttaattattatttttaaagtttaggtatatttttttttaatgttttgaaaatagtttttaatggatttttgagaaatgggaagttgagtttttttttttttatgtgttgtttgttatttttgttttaaaatagtaaattagtttgtgggttgaggttttttgttttttggagtgtggattttgattagttaaatattttgtggaagagtttggttttattttttaggtttaaatgttttttataattttttttgtttttaggttgggttgatttgatttaatgtgattgtgggagtatttgtttaggtgtaagttttaggtagatgtattgttagaaatggtattttatgtttttgggattgatttgtttttgttatttatattttgtttattttttgatagttttgtaaattttttaaaagtgtataataaatagggaggatattgtaagtttagtatataaaagatttgggagttgtggtgttgagaaagggtgtgaattatggtggggtataatagtagggatttgtggaggggtggttgtggatttttgtttgatttttgttgttttgttgagtaatttttgttttaattgttggggtttttggaagaatttttagttgttgggttggagggatgtaggaggtggtgggggtgggtgatgggtggttgtgttatgagttgtgatttgtgtttttttttttttttgtagattttagtagtaggttttgttatagggttttgggtgggtattatgggtggagggtgatggtatgttagaggtgttgggtgttgttattagtttggttgttagtttatttagtaaggtggttattttagttatttttattatgtttagtgatagtgagtgtgatatttgagttgtttatttaggatgtttagaagtagattttagtgtaaaaatgagaaaaataaaatgaaagaggggaagaagatgagagatttgtaaatttagtgttatagaagttaggtgattagggatttgtgggtttgggttgttgttttttgttttattttgtggttggtttggttttattggtgttttttggttgtgattatgggaattagtgtgaggtttgatttagtattatgttttttttgttttgtttttttttaaggattttgttgtaaagtttttttggaatttgaattgtaagttgagtgtttgtttagatttttttatgggtattttatgttgaaaggatgttgttatatatgtataatttttgttttaaagtttttttttaataaaatatatatatgttgtttatttatttatttaagagattgttatggtaggtttttttgtagtttggggaatttgttgtttttaaatatgtaggttggtggtgatgggttttgtgtggagaagttaaataataaaataatttagtgggtaatttttttaattaagggagttgtttttagattttttttttttttattattattaatattattttttttattaggtatgtagggatttttgagtaaatggtttttggaaggttttatttatatattttttgttttttttggtgttttttggtatatgttttaaataatttatggtaggtttataattattttttatgttaaattatatgtatgtgtatatatgtatgtatttatataaatatatgtatgtatttatataaatatatgtatgtatgtatatatgtgatatatttaaggttagaaattggtaatatgtgagtgtttttttta

SEQ ID NO: 459 - DNA, 3104 bp, Artificial Sequence
  Description of Artificial Sequence: Synthetic polynucleotide
tagagaggatgtttatatgttgttaatttttagttttaaatatattatgtgtatgtatatatatatatgtttgtataggtatatatatatgtttgtataggtatatatatatatgtatatatgtgtaatttgatgtgggaggtggttatagatttattataggttgtttaaaatatatattaggaagtattaaagaaggtaaaagatatataggtaagattttttggagattatttgtttaagggtttttgtatgtttggtgaagggaatgatattaataataataagaagaaaaggaatttgagagtagtttttttaattaagaaggttgtttattaggttgttttattgtttggtttttttatatagaatttattattattagtttgtatgtttagaaatagtaagttttttaagttatagagaaatttattatggtggttttttaaataagtaaataaatagtatatatatgttttgttaaaaaaaaattttaaagtgaaagttatatatatgtaatagtgtttttttgatgtgaaatatttatgggagaatttgggtaggtgtttagtttgtagtttgggttttgaagagattttgtagtaaaatttttaggaaaaagtaaagtaagaagaatgtggtgttgggttaggttttatgttggtttttgtggttgtggttaaagggtgttagtgaagttaggttggttgtggggtggggtgggaaatggtaatttgagtttgtgggtttttggttatttggtttttgtggtgttggatttgtaggttttttatttttttttttttttttattttgttttttttgtttttatattggaatttgtttttgagtattttggatgggtaatttagatgttgtatttgttgttgttggatgtgatggagatggttgaagtggttgttttgttggatagattggtggttgggttggtggtgatgtttagtatttttggtgtgttgttgttttttgtttgtagtgtttgtttggaattttgtgataggatttgttgttggagtttatggggaagaaagggaatatgggttatagtttgtaatatagttgtttgttgtttgtttttattattttttgtgtttttttagtttggtggttagaggtttttttgaagattttagtagttaaggtgaggattatttggtaaggtgatagaggttgggtaggagtttgtggttgtttttttgtgggtttttattgttgtgttttattatgatttgtgtttttttttagtgttgtagtttttaggttttttatatattgggtttgtagtgttttttttgtttgttgtgtatttttgggagatttataggattgttaggaaataaatgaagtgtgggtgataaggatagattggttttagggatatgggatattatttttaatggtgtgtttgtttggggtttatgtttgagtaagtgtttttgtgattgtgttggattgggttggtttgatttaaaggtaaaaaggattgtaaggagtatttgggtttgggggatgaggttgggtttttttgtaaaatgtttggttaattgagatttatattttgggaaatgaaaagttttggtttatggattagtttgttgttttgagataagagtggtaggtagtgtatgggaagaggaaaatttgattttttattttttaaaagtttattgaaaattgtttttaaagtattagggagggatatatttgggttttgaaaatgataattaatatgaaattgatatattgttaataagttaggttttgattaatagtaggagtttgtgtttaggttgataagaattagttttgggttttggggtttttaattgtttgtaggattttaattttttatttttttttttttttttgttttagtgaagttttggtttggtgattgggattagttgttgtagttgtttgtaggtgtggggagttagtgggtggggaagtagagttggtaagggaatttttggttaggagtttagaatgtagggtttttaatttaagatagattgtgtttttaatttttgttgaattggagttgttagggattgggtaagggtgttagaggtgtttttatttgttttttttttggtgtgtttaaagtgtggaggtttttaggtattgatttgtttttggttgtagttgtttggtttttttgttggtggtttttgaattagttgtttatttgtgtaggggttagtttggttgtttgggtgagtttatgttttttgttggggttagggtatggattttgtaggtattatttgtgtagtaggtgttgtgtgtgttttttgaagtagtgtgttttttgtttgttgttttaaatggtgtgtggtagtgggaattttttttttatttggtatttgtttataggttttaggggttttttatgtagttttttagttttttggtagtgtgttttaagttatagtgtttgtagtttggtgtgtgattttttggtgaatttgtggttttttaggatatgatagagtttgtggtagttgttattgtgaaaggttatgatggtttgtgtgtgtagtattgatttatttttgttgagggttttgtaggttgtaggggttatgggtagtgattagaggaagtgatttaggtgttttatattgttgtttttttttagggttttatatattttggttatttgttgggggttgaaatttaagatgggtagttggaatattgaggtagtgttggtggtggtgagggtattgagtttggagtgggatatgtagtagatgtttgtgggtttggttgagtgtgttaggtgtttgttgatgaggtggattggggtagtgggatatattattgggtggtggtggtggtttaatggttgggagtggatgattttgattggaggaggtgttggttttgtggtttggggtttgggtttggtttggtttaggtatgttggtaggtgagttggttttgttattggggtgggtggattggtggtgtgggtgttatggagattttttgttagttattgggtggttttgttaattaaagtttgaattagtatgttaggattattttagtatttttttgtgtttgatagtgtttgt

SEQ ID NO: 460 - DNA, 2493 bp, Artificial Sequence
  Description of Artificial Sequence: Synthetic polynucleotide
attggtatgattagagtagaaggagggtattttaatttttagttttatttattgttttgtaagaattaggaaaatgaatttttgttggttataaaattagttgtaggtgatgtaatttattttatttggttttttatatttatagttatataggaataattttttgaaatttagtttttttatttgtaaaatgggatggtaatatgtgtttttgggagttagtgagaattaaaagggataagatgtattggtttttaggggtaagtattagtagataaggaatagggtagttttttttttatattttatagagaagaaatgttttttaatttttttaggaggtagagtttagttttttttttaaatagttttggagttgtttggtttttttatttttttaatgaagttgtgggtagaagataaatgtagagtttttttgtatttgataaggagagagaagtagattttgtgtgagttttttgttgttgatgttgatttatagggggtgtaggatgggattgaggtaggtttatttgtttggaaagtttgtttgtattttgattttatggggttttaatatatatttttttagttataggggttttgtagagttaagttagttgttttatggaggtggggattttttttttgttttgttatttttttttttttttggagaggataggtaggtgggtatggttataggagaattttttgaaggtgttaattggtttagagaaagaaaggtggtttggtagggagttgtttattagagattgagagagtatgggagaagttgagagggaggaggaaagtgtatgttattttgtgtgtagttttgttttagggaaagtatgtgtgagaagtggtggtaggtggttgttagttttggaaataaataaatagttaattaaaaggttttggaaggaaggagtgtttaattaattagttttgagggataggtttgtattgtttgattgtgttttttagtttggttttaggttattgagtttaagtttttgttatagttttagggttgaggttgtttttaaagagttttgtaattgttttttatttgtgttttatttaaatattaaggttggtgtaggtggatatttttttatttttttttttttaggttgggttttagaaattagtagaggagggaggaattagttagtgtggttatgtttgggaggagaggtttgtgtgggtttgtggggttaagaggtaaaggtgggtggtggatgtgggttagtgggagtttggaggggttgatattgtttgttttattgtaagtttttggaggaagagttttgttgtgtttgagagtgagtgtgggtaggtgtaattatttggggttggggttttgggggttttgtgtagttttttttttttttagggatattgtttagttgtgttttgtgttttgttgattgtgtgggttttgagatgttggtggttgttttggggttggtttgttttttgtgtatatgtttagggttatttgtgttgtgtttttgttttaggtgtttggttagagaaagggtggtaagatggggtagtgtgtgtgtgtgtgtgggtaagtgtatgtgagtgtatatttatgtgagtgtatgtgtgtttgtgtttgtgtgtgtttaggggaattatagggagtatttttattttaagtttttagaggattgtttgaagttgttagatagaaatttttttagaatgtaagttttgggggggagggagttttgtttgatggttgttgtatttttagtgtttattgaagtattggggatatattagatgtttaataaatagttgttgagttaattaatggattttaggaatggaggtagattggtttttttggaattggagaaaggataaggttatattttattgttttttttgtttttggtattagttttggtgtttttggtaatgttaattttttttatatttagtttgtgttaagtttttttttttgtttgtgtttatatttttttttttttgtttttgttttttgttggtttttgtgtgtaagtattttagtagttagagtgagaggaagatgaaagaagtagaattttggaaatagagagttattagggtggttttttttttttggaaggatatggaaagatggggtgagattggtgtttttttttagtttttttttttgggaattgggattttgagttttagtttttttattttgaaatagtagttattttatttgttttgtaggattgttgtaagaagttaggtaggaggttgaaaagttttggagtatatgataggtgttatagaaatgtttgttttgttttttgattagtatttaatagtttgggagtgttttaggtgtggttgagggtggttatggtttgataattattattagaatattttttttttttttataaaatgttttgaggagaatttaatggttgttgaaaattaaggtaagttttatttttaaaatatttaggagttaat

SEQ ID NO: 461 - DNA, 2493 bp, Artificial Sequence
  Description of Artificial Sequence: Synthetic polynucleotide
attgatttttgaatgttttagaaatgaagtttgttttaatttttgatagttattaaattttttttaaggtattttgtgaaaaaaggaggggtgttttggtggtggttattaaattataattatttttagttatatttggggtatttttagattgttggatgttagttaggagatgaaatgaatgtttttgtagtatttattatgtgttttagaattttttagttttttgtttgattttttgtaataattttgtgaggtaggtggaatagttgttattttaaagtgaggaaattgaagtttaaagttttaatttttaaagggaggagttgaagaagagtgttagttttattttatttttttgtgtttttttagaaggaagaggttattttggtagttttttatttttagaattttgttttttttgttttttttttattttgattgttggggtgtttatatataggggttagtaggaaatagagataaaggggagaaggtgtaaatatgagtagggaggaaaatttggtataagttggatgtgagaaggattggtgttgttggggatgttagggttggtattaagaatagaggagatggtgaaatgtggttttgttttttttttagttttagaagggttggtttgtttttatttttagagtttgttgattaatttaatagttgtttattaagtatttaatgtgtttttagtattttaatgggtattgggaatatagtagttattaaataaagtttttttttttttggagtttatattttaggggagtttttatttagtggttttaggtagttttttggaggtttagaatgagggtgttttttgtggtttttttggatatgtataagtgtagatatatatgtgtttatataagtgtgtatttatatgtatttgtttgtgtgtgtatatgtattgttttgttttgttgttttttttttagttaagtatttgaagtagaggtgtagtgtggatgattttgaatatgtgtgtgaggagtaggttaattttgaggtagttattagtgttttaaggtttgtgtagttggtggggtgtggggtgtagttgggtggtgtttttgggagggaaggaggttgtgtggagtttttggagttttagttttgggtagttatatttgtttgtgtttgtttttgggtatagtggggttttttttttaggggtttgtggtggagtaggtggtgttaatttttttaggtttttgttggtttatatttgttatttgtttttgttttttagttttatagatttatatgggtttttttttttaggtatggttatgttgattgattttttttttttttattgatttttggggtttagtttggagggagaaaagtgggaaggtgtttatttgtgttagttttggtgtttgggtgagatataggtggaaaataattatagggttttttggaaatagttttggttttggaattgtggtagaaatttggatttggtggtttgaaattaggttgaggagtatagttaggtagtgtggatttgttttttggggttgattaattagatattttttttttttgaagttttttggttggttgtttgtttgtttttaaggttagtaattgtttattattattttttatatatgttttttttaaggtgaggttgtgtgtaggatggtgtgtatttttttttttttttttaattttttttatgtttttttaatttttggtagataattttttattaggttatttttttttttttgggttagttagtatttttgagaagtttttttgtggttatgtttatttgtttgttttttttaggagaaagagagagtggtagggtaggaggagggtttttatttttataggatagttggtttagttttgtagagtttttgtggttgggagggtgtgtgttagggttttatggggttagggtataggtaggttttttaggtaggtgggtttgttttagttttattttgtattttttgtggattaatgttaatagtaagagatttatatagggtttgtttttttttttttgttaggtataagagaattttgtatttgttttttgtttataattttgttgaagaagtggagaggttaagtaattttaaggttgtttggaaggagagttgggttttgttttttgggagagttggaggatattttttttttgtggagtgtgaagggaggattgttttattttttgtttgttagtgtttgtttttgggagttagtgtattttattttttttaatttttgttggtttttaggggtatgtattattattttattttatgggtgaggagattgagttttagagagttgtttttgtatagttgtaaatatgggaggttgaataggatgggttatattatttgtaattagttttatggttaataggaatttatttttttggtttttgtaaagtggtggataaggttgggaattaggatgttttttttttattttagttatgttagt

SEQ ID NO: 462 - DNA, 2315 bp, Artificial Sequence
  Description of Artificial Sequence: Synthetic polynucleotide
ttgtatttggtgtgaggttttttggttatggatgttgttggtgttatatttgtggtatttgaggtgaattgtttagatggaaatggtattattaggtaattggtaatagaagtttaaagttttgggtgttttaggttagaggaaggaaggaatgtaagggttttgttttttttaatgttaggagtgtgtgtttatagttttagataggataatttattgtaaatttaaagtagaaaatatggtttaattttatttttgtggtatttttatagatggtgtttatttgttttggtagtgatgattgatattgtgaatgttgtgttggtagtgtgtttaagggttttaattgaattattttgatggagttgaaatttagttttattttatagaagagaaaattgaggtttagagagattaggtgttaagttttatgttaagtatagggaagtaaaaataggatatatttaatataaggtggttttaggaattagtggttaggatatgggaggtgtgttgagtgtagatgggtagatgtaagttgaggtggtttgttggagggttttggattttttagaaaagaggatattagttgtttagggagggaaggtttgagatggattttggttggtgtggattagtttatggtgtgtttgtaggtagggatattttgaatagatatgggttgaggggagtttgtgtggagtgtggttagtgaaggttgggttggttggtagggtttgttggttatgggaggtttggtttgtagtagtagggtttattaaagatatggggatggatggttgatggataagatggttgatggatagtgttttagaaggttgtaggtttgtttaggttgaggttagggagggttagggtttttagggaaggagagtaagttaggggagttttttgtatagaagattttttatttgaggttgttttttaggagtttagttattttgtggagagtttggtgttgattgtggaagaggtgatggatgtgtgttgtgtgttggtgaaggttgagatggaaaagtttttgtagaataaggagttttttagtagtttgaagaaggggaaggtgaggttgtttagatgtggggttatgtttttgtttgttgggttaggggtgggtgttgagagggttagtttttaggattgtttgtttatgatttggttgggagttttgagggggtagtagggatagggtgggattttagggagttttggataaagtggggttttaattagttttttttgatagatttgttgttgttgttgggttaagtttttgttgtttttgtggttgtttagttgttttttttgtaagaggtgagttttttttttagttgttagtttataagggaaggaggaggtgagaaattttggggtagtattgtttatagaattttttgtgattttaggaatgttttagtatgtttgatggttgatgagtttataagatatggttagtatgaatgaggagttaaattttaaattgtatttaaattaaattaaatttaaatagttaagtaatttttagttttagttaagatggggtaataggtattttttatagttaagaataaataggatgtgaaataatggtttttaagatagtaggtaataaaaaggaaatataatggggtaagtttgttattattatagttattgtttggagagtttttaggttatgagttatagttgttggattttttagatggaggaggttaggttgagaatttagggagattatagtagtttgagtttgttgtgtagaattttagaggagagggttgtgttgagaaagttttagagaaggtttttttttttgaaggaaatgattgaaggttgtagaatatttattttaaagtagagattggtagattatagttatgggttaaatttggtttttggtttgttttgtaagtaaaattttattggatatagttatatttatttattatttgtttagttatgtttaaaaggtttattttttggttttttatataaaaaatttatttttttttgttttaaagatttgaagggatggtgtttaggggtaggaatgagtaatattggtttttattggttataggtagaaatgttataatttatagggtattaattggaatgtatataaaggatttgttttattaatgtggagtaagtagtttaaagtgattgttgttttaggtttgattgatatattataaaagtaagatttgaaaggattaaattgtttataagtattttaattgattttgagaataaagtttaagaataagaattttttaaatattaataaaaaa

SEQ ID NO: 463 - DNA, 2315 bp, Artificial Sequence
  Description of Artificial Sequence: Synthetic polynucleotide
ttttttgttgatgtttaaaaaatttttatttttgagttttgtttttagaattagttaagatatttgtgaatagtttgatttttttaggttttgtttttatgatgtattagttaggtttagagtaataattattttgggttatttattttatgttagtgaggtgagttttttgtgtgtattttagttagtgttttgtgaattatgatatttttgtttgtggttggtggaaattgatgttatttatttttgtttttgagtattgtttttttagatttttagaataagggaaggtaaattttttgtgtaaagggttagagaataaattttttaggtgtggttgagtgagtaataaatgggtgtggttgtgtttagtgagattttatttgtaaaataggttgaggattagatttggtttgtggttatagtttgttaatttttgttttaggataaatgttttgtagtttttagttattttttttagagagggggattttttttgaggtttttttggtgtagtttttttttttggagttttatatggtggatttgagttgttgtggtttttttggatttttagtttgattttttttatttggggagtttggtagttgtggtttatgatttagaaattttttaggtaatgattgtggtgatggtaggtttgttttgttgtgttttttttttgttgtttgttgttttgaaaattattgttttatattttgtttgtttttggttgtggaagatgtttattattttattttggttgaaattgggagttgtttagttatttaaatttaatttaatttaaatataatttaaaatttaattttttatttgtattaattatattttgtggatttattagttattgaatatgttagaatatttttggaattataggaagttttgtgggtggtattgttttgaggttttttgtttttttttttttttgtgaattgatagttaaagggaaggtttattttttgtagaagagatagttgggtggttatgagaatagtgggaatttggtttggtagtagtagtaaatttgttaggagagattggttagagttttgttttgtttaaagttttttggggttttgttttgtttttgttatttttttagggtttttaattagattatgagtaaatagttttgggaattggtttttttggtatttgtttttgatttagtgggtaagagtgtagttttatgtttaggtagttttattttttttttttttagattgttgaagagttttttgttttgtaaaaatttttttattttggtttttattagtatatggtgtatgtttattattttttttatagttagtgttaggttttttatggggtggttgaatttttaggggatggttttaggtaggaagttttttatgtaggaggtttttttagtttattttttttttttgaggattttaattttttttggttttagtttaaataagtttgtgattttttaaaatgttgtttattagttattttgtttattagttatttatttttatgtttttgatgggttttgttgttgtaggttaggttttttatgattagtggattttgttggttagtttagtttttattggttatgttttatataaattttttttagtttatgtttgtttaaggtgtttttgtttgtaaatatattatgggttgatttatattagttagaatttattttaaattttttttttttgagtagttgatgtttttttttttggaaggtttaggattttttaataggttattttagtttgtatttgtttatttgtgtttagtatattttttgtgttttggttattgatttttggggttattttatgttgagtgtgttttgtttttgtttttttgtgtttggtatagaatttgatatttgatttttttaagttttagtttttttttttgtaaaatggggttggattttagttttattgagatgatttagttaaagtttttaaatatattgttagtatagtgtttgtagtgttggttattattgttaaggtaggtgggtattatttatgaaggtgttatagagatggagttggattatgttttttgttttggatttgtagtgggttgttttgtttaaagttgtgaatatatgtttttggtattggggggagtggggtttttgtatttttttttttttttgatttgaggtatttagggttttaggtttttgttgttagttgtttgatggtgttgtttttatttgaataatttattttaggtgttataggtgtgatgttaataatgtttgtggttaggagattttatgttaggtatag

SEQ ID NO: 464 - DNA, 2304 bp, Artificial Sequence
  Description of Artificial Sequence: Synthetic polynucleotide
tgatttttttgttttagttttttgagtagttagaattataggtgtgagatatgtatttagttaattttttgtgttttttagtagaaatggggttttattatgttggttatgttggttttgaatttttgattttaagtgatttatttatttttgttttttaaagtgttgggattttaggagtgattttgtatgtttagttattaataaatatttattaagtgtttattttgtttttaagagtgttgggaatttagtagtgaataaaataaatatttttttttggggattttgaatttaagtttagttagggattattttattaagagattaagttaatatttaatttttttatagatttagataggatagtattttaattttttgttgatttgtttttttagattttagattatgggtattgtagatttttgtattttttgtagaggtagggttttattattattagagattttattattatttttatgtgaagggaaatagtgtttttttagtagataatgttaaattagttattagatgtgggttatggtgggtttgttgtgattgttataaatatgttttattgaagtttgttaggggatgttatatttttttttagaaagtaagaaatagagaaaggtttttttttgttttggattgttttttttttagttttaagaaatttttttatagttgttattttattttggtttgttttttgagtaagaaaattgttggaaagagtttgttatttatttagattataattagggagtttgttgttatttaggaagggttttaaaaaatttttttgatttattgtgagtgtaaatttttgatatttttgtatttttttatttattttattttgattttatatatagtgtgattttgaaaggaagtggtgtttttggagaggtagaaaaattttggaaaataaggtttatgatgttggttattagtatggggttgttgtttgttgtgtgatatgtttaggggtgatgtgttttttgaaagagatatttggtagagaaggtatgggtgtgaagtttggttgtgggagagttgggagtttgaatgttgttggttgttgtttatagtaggttttttttgagtattgtggggaggtagtgatatttgttggttttgtagtgatattttggtagttgttttgttttttagtttggatgtgataggtgtgttttggaggatagttagaggaagataggtaagttatattggttttttttgaggttatatttttgtttaggttaggttgtttttaatagatattttttgtgggtgttgaggtagttagttttattgttatttagataattttttttttgttttgttaattttgttttttttttaagaatgtttaaattttttatttaagtgatgagagggaaatatttgagttgtatatttaaggagatgtgggtttttattttggttttgtgatatattattggtgggattgtgggtgagttatttaatttttttagtttttagtttttttatttgtaaagtgggttttagtatatggtttaattgaggtaatatatgttgtttatgttagttgttgtttttatgttggttttgtttaggtttttttatggtaataggataggagttttttgtttgtgtgttagttttttattagtgtgggaatgttgtgaggagggggtggaatttggtgtagtaagggtttttgtttgtattttttattttttttttttttttttttttgagattgagttttgttttgttgtttaggttggagtgtagtggtgtgatttttgtttattgtaagttttgtttttagggtttatgttatttttttgttttagttttttaagtagttgggattataggtgtttgttattaagtttagttaattttttgtatttttagtagagatggggttttattgttttagttgggatggttttgattttttgattttgtgatttgtttgttttggttttttaaagtgttgggattataggtgtgattattgtgtttggtttgtattttttattaagaattagtaattatgggttgggtgtggtggtttatgtttgtaattttagtatttagggaggttaaagtgggtggattatgaggttaggtgatttagattattttggataatatggtgaaattttgtttttattaaaaatataaaaaatttggtaggtgtggtggtgggtgtttgtagttttagttatttgggaggttgagggaggagaatggtgtgaatttgggaggtggagtttgtagtgagttgagatggtatta

SEQ ID NO: 465 - DNA, 2304 bp, Artificial Sequence
  Description of Artificial Sequence: Synthetic polynucleotide
tggtgttattttggtttattgtaagttttgttttttaggtttatgttattttttttttttagttttttgagtagttgggattataggtgtttgttattatgtttgttaaattttttgtatttttagtagagatggggttttattgtgttatttaggatggtttggattgtttgattttgtgatttgtttattttggtttttttaagtgttgggattataggtgtgagttattatgtttagtttgtggttgttggtttttaatagaagatatgggttgggtgtggtagttatgtttgtaattttagtattttgggaggttgaggtgggtggattatgaggttaggagattgagattattttggttaaaatggtgaaattttgtttttattaaaaatataaaaaattagttgggtttggtggtgggtgtttgtagttttagttatttgggaggttgaggtaggagaatggtgtgaattttggaagtggagtttgtagtgagtggagattgtgttattgtattttagtttgagtgatagagtaagatttagttttaaaaaaaaaaaaaaaaaaaaaatagaagatatggatagaaatttttgttatattgagttttgttttttttttatagtatttttatgttagtgaaaaattgatgtataggtagagaatttttattttgttgttatggggagatttaggtagagttggtatgaaagtaatagttgatatgaataatgtgtgttattttagttaagttgtatgttggagtttattttatagataagaaaattgaggattagagaagttaagtgatttatttatggttttattaataatatattgtaaggttagaatggaaatttatatttttttgagtgtgtagtttaagtgttttttttttattgtttgaatgaagagtttaaatatttttgaaaggggaatagggttggtagagtgagagaaaaattgtttgggtgatagtgaagttggttgttttaatgtttgtggaggatgtttgttagaagtaatttaatttaagtgagggtataattttgagggaggttagtatggtttgtttgtttttttttgattgttttttaagatatatttattatgtttaggttggaaaataggatagttgttggagtgttgttgtgaggttagtgggtgttattgtttttttatggtgtttagagagagtttgttgtgaatggtagttagtgatatttaggtttttagtttttttgtagttgggttttgtgtttgtgttttttttattaagtgttttttttgggaggtgtgttatttttgagtatgttatatagtagatagtagttttgtgttgatggttaatgttataagttttattttttagagtttttttatttttttaaaaatattgtttttttttaaaattgtattatgtgtaaaattaaaataagatggatggggagatgtaggaatattagagatttgtatttatagtaaattagaagaattttttaaagttttttttgagtgatagtaggttttttgattatgatttgagtgaatggtagattttttttagtagtttttttatttaagagataggttaggataaagtaatagttgtaaagaaattttttagagttgagagaaagatagtttggggtaggagaaagtttttttttgttttttattttttaggggagggtatggtgttttttggtagattttggtgaggtgtgtttgtggtagttatggtaaatttattatgatttatgtttgatggttgatttaatgttgtttattgaaagggtattgtttttttttatatagaaatgatggtaaagtttttggtagtggtgaaattttgtttttataaaaggtgtaaaaatttgtagtgtttatggtttagggtttgagggagtagattaatgagaaattaaaatattattttatttgagtttgtaggagaattgagtgttgatttgattttttaatagagtgatttttgattagatttgagtttaaggtttttgagggaaggtatttattttgtttattgttaagtttttagtatttttgggaataaagtaggtatttagtaagtatttattgatggttgggtatgtgggattatttttgaaattttaatattttgggaggtgaaggtgggtggattatttgaggttaggagtttgaggttagtgtggttaatatggtgaaattttgtttttattaaaagatataaaaaattagttgggtgtatattttatatttgtaattttagttatttgggaggttgaggtaagagaattg

SEQ ID NO: 466 - DNA, 2470 bp, Artificial Sequence
  Description of Artificial Sequence: Synthetic polynucleotide
gtggaatatattttttatatagttatattatttaaaatttattgtttttaagtttttatttaaatgtttttttgtgaagttatttttgagttttttttaaaattgtagttttttatttttgtattttttattgttttttatttttaatttttgttattgtagttagaattatttgatatatagtttttattttattggttttttgttatgtttttttttataagaatttgaagtttattaggttgggagttttgtttgttgtgtttgttgttattttttagtgtttaaaattgtttggtatatagtaggtatttaataatttttgaattagtgaaaattagatggtggtttggtatttttatataggaatgagttaggtggaaattatttaggatataagtagattttgaagtgataaggaagggttattataattatgtggggtttattttgtttttttttgttttttttttttaggtttagtaatagttttattaaggattttatgaatattaaagtttatatttatatgttgttagaggtgagagtagtttattttattattagattttgtgtttagggtggtgatttgaagaaggaagagagtgaaagaagggaaggattatttttttttttaaattggagttaagggagggaggttagagtaagtttgggggtgtaatttagatttagtttttgtttaattttttttgtttttttttttaggggtttagagaattataaggtttgtagaattttttagagaagttttattattgattttttttttttatttttagatattaaagagtttgaatgtttttgagttatatggtttttttttttttttataaattttgttagttgttatgggggtttgtttttagggtataaagttattgagagatttagagatttagtttttttgtggaatttttaaaatgttttagtagttttgtttttagtttgttgtttggtagtatttgttagttgattttatgtattgtttttttttttgttattttggtaatttgggttttttattttatttttttttttatttttttttttagatgttattttttgaattgttatagagaatgggttaatttatggtggaggtttgtttatttttataataattaaagggttttaaggtttatgtttttatatatttaattattttttaggtattttaaattatatttaaattttaatttagttttattttgttttagtttttgtttgtaagtgttttagtttttaatgggtatagatttggattttgttttttttagttgggtttttattttaggttgagtttagttattgttaattaatgtagagttaggttttttttttttttaattttggttgtagtttaattttgttttttgaaagtattttgtttttgttatttaatgtttttttgtgtgtttgatagttattttgtttttttatttttgttgtgttttaaatttgtttttatttagttttatggttttgtttaattgtagagttgttttgtttgtttatgtggagtttagtttgatttatttttgttggttgttatgtttatttttatataagttttgtttttgttgagtagtatggtgtgtgatattgtttttttggtgttttggtaggggtttagaagttttttgtttgttaattagagaaaaatagggttatttatttttgtttttgggggttgttttttattaattttatgtaagttaattagtgtgaggtagatttttgtttttttgatataggttttgagtttttttagttgtttatagtttgttagtttttgagttaattggtgtggagtattgtgaaggttgaatgtgtttttttgggattttaggggttgtgagtgttttattatttttttttatgttaattatggtatagttttgtagggaagggtttgttttttaattttttgaggttttgtggttgattaatagtgttttggttaattagtgagtggtgggatattgggttttttttttttgggtttatgtgagttgtagggaaatgtaggggtggtttttaggtgttgttgttgttattgttattattatttttattgttgttttggaatttaggtttggggggtggtggggttgtgtatggagtttttgttttttggagttgttaatattgttaatgttattgttatgttatatataggtgagttttgggtttggagggtggagggtttagtttgtgattttatgtattttttttgtttttgtgtagaggatgtggtttggttggtggtttgttggtgtttgattttttgttgttattattatggttggtggatttgtgtgtggtattgtttaagttttttgttttttatagtggatttgattgtggtttaattttttttttttgttgtataatggattggtttgtgtgtttatgtttttttttatgttaatttagggtggatttgttt

SEQ ID NO: 467 - DNA, 2470 bp, Artificial Sequence
  Description of Artificial Sequence: Synthetic polynucleotide
ggatgagtttattttaagttggtgtggggaaaaatataagtatgtagattgatttattatataatgggagggggaggttaggttatggttagatttattataagggatgaagggtttgagtaatgttatatgtaggtttattagttgtggtggtggtggtggggagttgaatattagtaggttattggttaagttatattttttgtgtgggggtgggaaggatatgtggggttatggattgggttttttattttttaggtttagagtttatttgtgtgtagtgtggtggtggtgttggtaatgttggtagttttggggggtgggggttttatatgtggttttattgttttttaggtttgggttttgaggtggtggtggaggtggtggtggtggtggtggtggtagtatttagaagttgtttttgtgtttttttatagtttatgtgggtttgaggaggaggagtttaatgttttgttgtttgttgattggttaaagtgttattaattggttgtaaggttttgaggggttgggggatgggtttttttttatagagttgtgttgtgattggtgtaaggggaaatgatggaatgtttatggtttttggagttttgaggaggtgtgtttggtttttatggtgttttatgttgattggtttaaggattgatggattgtgagtaattgaaaaggtttggggtttgtgttgggggggtgggggtttgttttatattgattggtttatatgggattgatggaagatagtttttaaggatgggggtgggtggttttgtttttttttgattggtggatgagggatttttagatttttgttaaaatattaagggggtggtgttgtatgttatgttgtttagtggaagtagggtttgtatagaaatgggtgtagtagttggtgggagtgggttggattgggttttgtgtaggtgggtagggtagttttatggttagataagattatagagttgggtaaagatgaatttagaatatagtggaggtaggagggtaggatggttgttaggtatatgaaagagtattgagtggtagaaatgaaatgtttttagagggtagggttgaattgtggttagagttaaaaaggggaggaatttggttttgtattgattggtggtggttggatttaatttagaataggggtttgattagggagagtgggatttaggtttgtgtttattggaagttggaatatttataagtaggggttaagataaggtagggttgagttagggtttgggtgtaatttggggtatttggggaatgattgggtgtgtgaaagtgtaaattttagggttttttgattgttgtgggaatgaataaatttttattatgaattggtttattttttatggtaatttaaagggtggtgtttaggaaaaggaatggaagaaagggtgaggtggggggtttaggttgttaagatgatagaagagagggtagtgtataaggttaattggtaaatattgttaggtaataggttggaggtaggattgttggggtattttggaggttttatagagagattggatttttgggttttttagtaattttgtgttttaggaataggtttttgtggtaattagtagggtttatggggaaaaagaagggttatgtgatttaaaggtatttaggttttttaatgtttgaggatggggggaagaagttaatggtgaggtttttttgggaaattttgtaggttttgtagttttttaagtttttgaaaaagaggatagaagagattgaataaagattgggtttgggttatgtttttaggtttgttttgattttttttttttgattttagtttagagggaaagatggtttttttttttttttgtttttttttttttttaggttattattttaaatatagagtttggtagtggggtgagttgtttttatttttagtaatatgtggatatgggttttgatatttatggagtttttggtgaggttgttgttgagtttagagaaaagaaataagaaagggtaaaatgggttttatatgattatgatgatttttttttattattttaagatttatttatattttggatgatttttatttggtttatttttatgtggaaatgttaagttattatttggtttttattgatttaaagattattaaatgtttattgtatgttaggtaattttaggtattgggagatagtagtaaatataataaataaaatttttggtttgatggattttaaatttttgtaaagaaagatataataaaaaattaatggaataaaagttatgtgttagatggttttaattataataataaaaattaaaaatgagagataataaggagtataggagtggggggttgtaattttaaagagggtttagggatggttttatggagaagtatttgagtaaagatttaaagatagtgaattttgagtagtgtggttatatggaggatgtgttttat

SEQ ID NO: 468 - DNA, 2470 bp, Artificial Sequence
  Description of Artificial Sequence: Synthetic polynucleotide
tttaaaaagttttgtaaattaaaagtttgggggtaaatttatttggtagtaaattttgatttgaggttatttatagtttatattttgtattttttttatttagtatgaataagtatgtaagttttattgtatgtttgattttagtatgtttttttagattttttgggggtgtttatgtatgttggtgggggaaagagattaatttttaaatattattttaaatagttggttttattgtgtttgtttgggtagtatatatattaaaattggaatgatttttgtatagggatgaaatgtaaatttgtgaagtatattgtattttttttagtatatattatttttggtaatattttttttttttttttgagagggagttttgttttgttgtttaggttggagtgtagaggtgtgattttggtttattgtaagttttgttttttgggtttatattatttttttattttagtttttttagtagttgggattataggtgtgtgttattatgttaggttaattttttgtatttttagtagaggtggggttttattgtgttagttaggatggttttgattttttgattttgtgatttgtttatttttgttttttttttgaagtgttgagtgttgggattataggtgtgagttattgtgtttggtttttgttttttttttttagattgattttattatttgtttagtaaaggagaattttttggtagaatagtttttaagaataaggtaaataattaattttatataggtttttattaatgtatagttgttgattgtgattggtttttggtaatttggattttataatttggataaggggataaataattgtttgttttttattattttttttgaatttgaatagaatttttttatttttatagttttttagtttttttttttttttttttgagatggagttttgtttttgttgtttaggttggagtgtagtggtgtgattttggtttattgtaaatgttgttttttaggtttaagttatttttttgttttagttttttaagtagttgggattataggtgtatgttattatgtttggttaatttttggatttttagtagagatgggggttttattatgttgattaggttggtttttaatgtttgattttaggtgatttgtttgttttggtattttaaagtgttgggattataggtgtgagttattgtgtttggttttttatagttttttagttttttaaaatttgaaaaattttgtaaagatatatttgggttaaagggtttagataatggattgtggtttttaagtatttatgttataggttattgagaggattgatttagttattagatgtaaaatgttgggattagtgtttggtaaaggaaaattttgtatagttgtaggtttttattatatataatagtattgttaatgaatgttattataatatttatttagtgtttattaagtgtttattttatataaattttgagaatataatgtgaaggtgaattgttgattaaagtttggttttttttgttttgtttttttgtgaaaatgttttaatggtaggaggttatgtgagtgttggatgtgtttttttttgtgagtttttttttgaggttttttgggtttttttggttatttttgtttgggtggtgtgtgtttttgttgtttttgtttttgttttagagaggtagggttttttgagtttgttagttttgtggttgtaattaattttgggttggagtgttttggtttggttagttttgtggtgtgagggaaggggagtttagtagttttttgtgtggggtttaggtgttggtggtagggtgggttttttattgttagtgtgttagttttgtttttatttattagtgtgttagttttgtttttttttatgttgttgtgtgtttgggggtggggtttggtgtgtattgtttgtgtatggtgaggtgtttgttgattggttattggggtttgggtttttttggtggagtgtgtttttttttagattttttgttagtaggagttgtgtggtagatgtggtgtttttaggagttttgtttgatagaatggttgggttttgttggttgttggtatgttgtgatagagtattttgtatagttttttttttaagtttttggtgttgagtgatgttaataaggttttggttagggttttatgtgaaggtggttgtgttgttgttgtttttggggtttttttttttttaggtggggatgtggtttggagtgaggttgggtttgggtttaggtttttggtgtgttttgtgttattgtttaaggtgaagaattttaatggagggttgtggagattggtagtgtttgttgtttttattaggtagtggggtgggggtggggttgaaggtgggggtatagtggtggggtgtttggaatttggtgaggggaggtttgtatagggggttgggggggtgtatggtttggttttgggtttggagg

SEQ ID NO: 469 - DNA, 2470 bp, Artificial Sequence
  Description of Artificial Sequence: Synthetic polynucleotide
tttttgagtttagggttaggttgtgtatttttttaattttttgtgtgagtttttttttgttgggttttaagtgttttgttgttatgtttttgtttttgattttatttttattttgttatttggtgggggtagtaggtgttattgatttttgtagttttttgttgaggttttttgttttgggtggtgatgtggagtgtgttaagggtttgggtttaggtttagttttgttttaggttgtatttttgtttggggaaggagaggttttgggggtagtggtggtatggttgtttttgtgtgaggttttggttgaggttttgttggtattatttagtgttggagatttggggaagaagttgtatagggtgttttgttgtgatatattgatagttggtaaggtttaattgttttgttggatggagtttttaaaagtattgtatttattgtgtggtttttgttggtgggaaatttggggggaggtgtgttttgttggaggaatttgggttttagtggttaattaataggtgttttgttgtgtgtgggtggtgtgtgttaggttttgtttttgggtgtgtggtgatgtggggaagggtggggttggtatattggtgggtaggggtggggttggtatgttggtggtgaggggtttgttttgttgttgatgtttgggttttgtgtggggaattgttgagtttttttttttttatgttgtggggttggttgggttggaatattttgatttggggttagttgtggttgtggggttagtaggtttggaaagttttgtttttttggagtggaagtgggaatagtgggggtgtgtattgtttgggtggggataattggggggatttgaaaggttttggaaaggggtttgtggggagaaatgtgtttagtgtttgtgtgattttttgttgttagagtatttttgtaaggagatggagtgaaagggattaaattttagttagtagtttatttttatgttgtatttttaagatttgtatagagtaggtatttggtaaatgttaaatgaatattgtaatagtatttgttagtgatgttgttgtgtatggtgaaagtttgtagttgtataaagtttttttttgttaggtattgattttagtattttatatttggtaattaaattgatttttttaataatttgtgatgtaagtatttaagggttatagtttgttatttgagttttttgatttaggtgtgtttttataggattttttaaattttagaaagttaagagattatgagaggttgggtgtagtggtttatgtttgtaattttagtattttgggatgttgaggtgggtggattatttgaggttaggtgttgaagattagtttagttaatatggtgaaatttttgtttttattaaaaatttaaaaattagttgggtgtggtggtatgtgtttgtaattttagttatttgggaggttgaggtaggagaataatttgaatttgggaggtagtgtttgtagtgagttaaggttgtgttattgtattttagtttgggtgataagagtgaaattttgttttaaaaaaaaaagaaagaaagttaagaggttatgagaataaaaaggttttatttaaatttaagaaagatagtggaagatagataattgtttgtttttttatttagattgtgaaatttagattgttggaaattagttataattaatagttgtatattggtaaaaatttatgtaaaattagttgtttgttttgtttttggagattgttttgttagaaggtttttttttgttaggtaagtaataaaattaatttaaaaaaaaaaggtgggggttgggtgtagtggtttatgtttgtagttttagtatttggtattttggggggggggtggaggtgggtggattatgaggttaggagattgagattattttggttaatatagtgaaattttgtttttattaaaaatataaaaaattagtttggtgtggtagtatatgtttgtagttttagttattggggaggttgaggtaggagaatggtgtgaatttgggaggtggagtttgtagtgagttgagattgtgtttttgtattttagtttgggtgatagagtaagatttttttttaaaaaaaaaaaaagaatattgttaaaggtggtatgtgttaagaaaaatatagtatgttttatgaatttgtattttatttttgtgtaggggttattttaattttggtatatgtgttatttaagtaagtatagtgaaattaattgtttgagataatatttgagagttggttttttttttttattggtatatgtaaatatttttagagagtttgggggaatatgttgaaattaaatatgtagtaaaatttatatgtttatttatattaagtagaaagaatatagaatatagattataaatagttttaggttaaaatttgttattaaatgagtttatttttaaatttttggtttatagagttttttgga

SEQ ID NO: 470 - DNA, 2470 bp, Artificial Sequence
  Description of Artificial Sequence: Synthetic polynucleotide
atatattatattgtgtatgtaatgtataagtatttattttgtttgtttggggttttgtttgtttttgttgagtttgatttttttatttgttgtttggtttttgttttatgttttagtgttattgagattaaggagagaatgaatttgttgttgattgggtagagtgagtgtgtggattgtggttattgtttgtttattatttgtgtgtatttgggttggtattgggtgaagaattgtgtgggtttgggatttgggggtttagagggagtgagtttttgtgtgggtgtttggtttgtaggttttgtaggtttaggggtgtgttttgtttttatttttattttggattttggtttttttttttagatagtggttttttttatttttggtttttgtaggttgttagtagtttgtgttaggttttgttggtgtttttagggttttttagattgtgtagattttgatatttttgtttggttttgggttttgggagttgagagttggttagggttttgtttgtatttttgggtgtttagttttgggtttgttttttgtggatgttttaatttttttggttgaatggatggtggtgtgtgtgtgttttattttggtggtgttggttttttttgttgttaaaattagatttaaatttttgtatgggatttgtttttgggtttttattttgtgtgtttagtaaatagtgggtgagttatgaagatgtgtgagttagttggattttttttgttaggtgtggatttgttgtggttagagaatttagtttgtgttagtttggtttgtttgtgaagttatgggttttattgatgtgattttttaagatgtgggggttattatgggtagaggatattggtttggagttagattatgggttttataagtattagattataagtagtgttgttattgagagttgtttggaatttgtttagtatgttgggttttttagttagggtttggtgtatgtggttgagggttttggaagttttgatggtttaggaggagtaggtgggtggggtggtgggtgttgttggttggtagagagttttggtttgatttagtgtaggtttggtgtgtgtagagaataattttaagtgtattgatgtttgtgagttttttttaaatattgaatgggatttagagtttgagtttataggtggtggttgggggagggagtagggtgttggttgttgtttgggagtgtttgtgttttgggtgatttttggaaggatgtggggtttaaattttggttggggttgggagagtagtttttagaggttttttgtgggattttttgttgggtgggattgtggttttataggagaagtgggtggtaagttttgtttggtggaaagtagttgtttttttttttttgggtttggggtggtgttttttatttttgttttttgttttttatttttgttttttgttggttatattttttgttttttggattttaagtgttttgtgtgttgaggagtttagtgttagtggtggtggttaggagagatttgggtgttaggaaagatgggttgtttgggggatagtagggagtttgggggaaatgtaggtgttgggtatagagttggtattggtgtttttagttttgttgaagattgtggttgggtttggtttgtgggaggggttttggtgttggatttgttttggttttgtgtgggtggttttgttgggttttgtaggagtgatgtgtgttaaaaggtggtgggaaggaggtggggtagagtgtgtttgggattttgatttggatgtggttagttggagaggtggagtgttgggaggagattttggttttgttgtgatttggtggtttgtgttgtttttttgtgtgttgggttaaaaaggtgttaatgtttgtggttgtttattttttgtggtgttttttttttttgtgtttatataatttgtttaggggttgggtagtttgttttgtttttttgtttgtgtatttgtttggaggtttgtgtgtttgtgaaggggatgtagtgaaattggggtttgtgttaggttagttgggatggatgttgatgtttggggttgtgatggttgtaggtaggaggtttagggttggggggtggtttggttttgtgggtgggggttggagtgtagtgttgggtaggtatttgggtttgtagttttgaagttgggaggtgaggggagagtgattggggatgagttgggataaggtgatataggggtttttttggagttggattggtttttgggatttggtgtttgtgagaggttggagtggttagagtttagtttgtgaggagatgtgggttttgtttttagtgttggttgtttttggtgttaaagatagttttgtaggggttttgggagggttttttttttgttgttttttttttattttgggttttgagggttgttgggagggtaattttgggaagaggttggggtgtggggtgtgggtgtaggt

SEQ ID NO: 471 - DNA, 2470 bp, Artificial Sequence
  Description of Artificial Sequence: Synthetic polynucleotide
atttgtatttgtgttttgtattttggtttttttttggggttatttttttaatggtttttggagtttggggtggagaggggatagtaggaggagggtttttttggaatttttgtggggttgtttttggtgttaaaggtggttggtgttgagggtaggatttgtgtttttttgtaggttagattttggttgttttagttttttgtgagtgttaagttttaggggttgatttaattttgagggagtttttgtgttgttttgttttagtttgtttttgattgttttttttttattttttagttttggagttgtgagtttaggtgtttgtttagtgttgtgttttagtttttgtttgtggagttgaattgttttttggttttgggttttttatttgtagttgttgtagttttgggtattggtgtttgttttggttggtttggtgtgggttttggttttgttgtgttttttttgtgggtgtgtgagtttttgggtgggtgtgtgggtggggaggtagggtgggttgtttggtttttaggtgggttatatgggtgtggggaggggaggtgttgtggggagtaggtggttgtgggtgttagtgtttttttagtttggtgtgtgggaaggtagtgtgggttattgagttgtggtggggttaaggtttttttttggtgttttgtttttttagttggttgtgtttaagttggggttttgggtgtgttttgttttgttttttttttgttgttttttggtgtgtgttgtttttgtagagtttggtgaggttgtttatgtagggttgaagtaggtttggtgttagggttttttttgtgggttagatttgattgtgatttttggtagagttggggatgttggtgttgattttgtgtttgatgtttgtgttttttttggattttttgttgttttttagatggtttattttttttgatatttgggttttttttggttgttgttattagtgttgggttttttggtgtgtggggtgtttggaatttaaggggtaggggatgtggttggtggggaataggggtgaggggtggggaataggggtgaggggtgttgttttaggtttaggaggaggggaatggttgttttttgttaagtagggtttgttatttattttttttgtggagttatggttttgtttggtagaggattttgtggagagtttttgggggttgtttttttaattttagttggagtttgggttttatgtttttttaggggttatttaggatgtgaatatttttgggtggtggttagtattttgtttttttttttggttgttgtttgtgggtttgggttttggattttgtttggtgtttggaaggagtttgtgggtgttggtgtgtttggagttgttttttgtgtgtattagatttgtgttaggttaggttgaagttttttattggttagtgatatttgttgttttgtttgtttgttttttttaggttattggggtttttagggtttttgattatgtatattaggttttggttaggggatttgatatgttgggtgagttttgagtggtttttagtggtggtgttgtttatggtttgatgtttatggggtttgtgatttggttttgaattgatgttttttgtttatggtgatttttatgttttggaaagttgtgttagtgaagtttgtggttttgtgagtgagttgggttggtgtagattgggttttttggttgtagtgggtttgtgtttgatggggagggtttggttgatttgtatatttttatggtttatttattgtttgttgggtgtatggggtggggatttaaagatgaattttatgtagaggtttgggtttagttttggtaatagaaaaggttggtattgttggagtaggatgtgtgtgtattattatttatttggttggggaggttggggtgtttgtggggagtagatttgaggttgggtgtttggaggtatgagtaggattttggttggtttttagtttttagaatttagggttaggtggggatgttagggtttgtgtgatttggggggttttagaggtgttggtggggtttggtgtggattattagtggtttgtgggagttaggggtggagggggttgttgtttagggaagaggattggggtttggagtgggggtgagaatgaggtatgtttttgagtttgtgaaatttgtggattgagtgtttgtgtaggagtttgttttttttgggtttttaggttttagatttgtatgattttttgtttggtgttagtttagatgtgtgtgggtgatgaatgggtggtggttgtgatttatgtgtttgttttgtttagttagtggtaaatttgttttttttttgattttagtggtattggagtgtgaggtaagggttaggtggtaggtagaggggttggatttagtaaaagtaaataaaattttaagtaaatgaaataaatatttatatattatatatatgatataatatat

SEQ ID NO: 472 - DNA, 2470 bp, Artificial Sequence
  Description of Artificial Sequence: Synthetic polynucleotide
aaaattgaatatttgagaatattggatttatatttttgagggtaataatttgttagagttgagtagttgttttttttagttatggtatggatattttaatttgttattttttttattattttttattgttttatataaggttagttttatttatttgttttatttgtttggtttttgtagttatttgaatttgtaaatattatttagattttttttgttttttattaaagtttattttgttttgttttaagttttttattagtgttttaaagtaagagttaggtaatttgattaaatataggttttttaatatgtgttttttggagatagtattttaatagaaagagatgattttgtaggtagaaattataggtattattggattataattaggatggtaattgtttgttttattttttttgttattttgatgtagttatattttattgttttaaagtagattaaaggaattggttttatggtagaataatggatgttggttttatgtatgaaatttttttaagttgtatttttatagattattttagttttaaaagatttaaagttattatgggtttttttgatttttttatttttttggaggttttaggatatttggtttgatggtatttttttttatttgtttttggggtttgttttgtgttgggtagttgtgtttaaggagtgtgtgtatttagtatgagtttattttttatgggtgtttttagaggtttggttgggttgtgtatattaagtgtagtaagtttttgtattaatggtttttgtggttgggtggggtgtggttgtttaaaggtgttgtttttttggaagttttgtttttattttagtgtttgagagtttgtagttggttgggaaggtttttttggtttgtttggtttttttggggaagaggttaatatttggtatatgtgatttatggtagaggggagttttgggtgtgtagaattggttgtgttttgttgagagttttttgtgggtggggagagtttttttatttttttgtttgtttgagtgtttagagtttagggttgttgattgtagtattttttgatttgttgtattgagggtttgtggtttttgtgtgtggtttttattgttgttggaggtggttgtaggtgaattgttgggttgttagttatgatttgagttaggtatttttttgtttttgggattggggttgaaggttaattatattgtagttaggttttgtgattggatggtagtgagagttgattggttgttgttgtgagttttgggtttttttttttttttttttgttttaattttagtgtttaagttttaggttaatgagatagtgttttatagatgttttttttttgtttttttttttttattttggagagggaggggaagttttgattggttagattgtttttggaagtttttttttttttattaattattgaaggaggtatgtttttagtggagttttttagttaattataaagtggtggtggtgtttagttgtgtagttttattagtgtttttgggttttattgtttttaattttttaagtttttttgtaagggttggtgattttgattggttattgttgttattgttgaatgttttttttagttagttattgaataaggtgaatttattttttttgtttggttatttttggtattttttgttttttgggtgtggttttttagtgttattttttaattggttttttaggttgattggttttttttgggaggagttgtaaataaatgatgtttgtgattggttttgtttgggttttggtttttagttgaagtgggtgagtgtggggtttggttggtgatttttagatgtttgttatgtgggtggtggggtgttgggtggtgtaaggttgggtgggggaggaaggaggtggaggatgagtaggaggggggaggaggagtggggaagtgtaaggtggttgtgtagatagtgttttttatatagagtagtttttgatttgggtgaatgtgggtttgtgttgttgttgttgttgttgttgtttgggttaagtgataaaggaaggaaggaagtgaggaggagttggttttgtagttgttgatagggttttgggttggggtaaagtgtggatattttttgagtgggtattgagtagagttgaggggtgggagggtggttgagttgttgttgtggatgggggagggggttttgagggatggaagtggttgttgggtttttatgtttttggtgaatggggaatagttgaggagttgttgtttggggtttgaagggagttgtttttgttattgttatggttgttggatttagttgttgtttgtagttgtttttggtgtaatgaggagaggagttgttgttattgttattgtttgtttttgattgatttgtgattttgttgttttttagtttgttgggtttttgttgttagtttgttggattttgtggtttgttggagttgtag

SEQ ID NO: 473 - DNA, 2470 bp, Artificial Sequence
  Description of Artificial Sequence: Synthetic polynucleotide
ttgtagttttggtaagttgtgggatttggtgggttgatggtaggggtttggtgaattagagggtggtggagttgtgagttagttagaggtgggtggtggtggtggtggtggtttttttttttattgtgttaggagtagttgtaggtggtggttggatttagtggttatggtggtggtggaggtagttttttttagattttaggtagtggttttttgattgttttttatttgttggggatatgggaatttggtaattgtttttgttttttggggtttttttttttgtttgtggtaatagtttggttgtttttttgttttttggttttgtttggtgtttgtttaggaagtgtttgtgttttgttttagtttagagttttgttagtggttgtggggttggtttttttttgttttttttttttttttgttatttggtttgggtggtggtggtggtggtggtggtataagtttgtatttgtttgggttaggagttgttttgtgtgaggagtgttgtttgtgtagttgttttgtatttttttattttttttttttttttttatttgttttttatttttttttttttttatttagttttatattgtttagtgttttgttgtttgtgtaataggtgtttgggaattgttggttgagttttatgtttgtttgttttggttgggagttgaagtttgaatggagttaattatggatgttgtttgtttgtggttttttttggaaaaagttgattagtttgagaaattaattagaaagtgatgttgggaagttatgtttaaagagtggaaaatgttgaaggtagttgaatggaaagggtgaatttgttttgtttggtggttggttggaggagatatttgataatggtaatagtggttaattagagttgttggtttttatgaagaggtttgaagagttgaggatggtgaaatttagagatgttggtgaaattgtatggttgggtgttgttgttgttttgtgattggttggaaaattttgttgggagtgtattttttttggtgattggtgaagagaagggggtttttgaggatagtttggttagttaggattttttttttttttttaaggtggggagaagaaagtgaagggagggtgtttataaagtgttgttttattggtttgaagtttaggtgttggagttggggtaaaagggagagggagggagtttgaaatttgtggtggtggttaattggtttttattgttgtttaattgtaagatttagttgtagtgtgattggtttttggttttggttttaggagtggggagatgtttgatttgggttgtggttgatgatttgatggtttgtttgtggttgtttttaataatggtggaaattgtatatagggattgtgggtttttggtgtagtaaattggaaagtgttgtggttggtggttttgggttttgagtgtttaagtgagtagaggggtggaggggttttttttatttataggaggtttttggtggggtgtagttaattttgtgtgtttaaggtttttttttgttgtggattgtgtgtgttgagtgttggttttttttttgaaagggttagatggattaagggggtttttttagttggttgtaagtttttagatgttaaaatgggaataaagtttttagaaaggtagtgtttttgggtggttgtgttttgtttagttgtgggggttattgatatagaggtttgttgtgtttggtgtgtgtggtttggttgggtttttggaaatgtttatgagaaatgagtttatgttggatgtgtgtgttttttgggtgtaattgtttagtgtaaaatgggttttgaaagtaggtgaggggaaatgttgttaggttggatattttgaagtttttgaggaaatgggggggttagaggagtttgtggtagttttggattttttggaattagggtgatttataaaagtgtagtttgagaagattttatatataagattagtgtttattgttttattatagaattagtttttttggtttgttttagaatagtgaggtatggttatgttaagataatagagaaagtagaatagatagttgttattttgattgtaatttagtggtgtttgtaatttttatttgtagagttatttttttttgttaagatgttgtttttagaaagtatatgttaaaggatttatatttgattagattatttggtttttgttttgaaatattgatgaaggatttgggatagaataaagtaagttttgatggaagataggaaaggtttagatagtgtttgtagatttaaatggttatagaggttagataagtaaagtaaatgagtgagattggttttgtgtaagataatggggaatgatagggaaaatggtaaattggaatatttatgttataattaaaaggaatagttgtttaattttagtagattgttgtttttaggaatgtgggtttagtgtttttagatgtttaatttt

SEQ ID NO: 474 - DNA, 2470 bp, Artificial Sequence
  Description of Artificial Sequence: Synthetic polynucleotide
ttttgtttttatgtttagtttattgaagtttgtttttaggttattggagttgagttttttgaatatttttggtttagagtgttgtagatttatgaattgttgtttgttgaaataaggtgtaaagtttattttgtttaaagtttttaataggagtgataatttaggtaaaatgtttatataatagtgggaaattaaaagtttgtgatatagaaaagtgatatatatttgtaaatttttttaataaaggtattgtagtataagtatgattgtagagttagattgttaatgtttaaattttttttgggttttaatttttttatttgaaaattgttaatagtggaatttagttgatagggttgttgtggagtaagtgtttttaatttggagtttatgaaattttagtatttgtgaattttgtattgaaaaaattgtaattttatgtttattaattttataatagttttgtttttttgaattataaaggtaggtaataaattatagtagtattattagtatttataattttgttttttatagaaattatttttatatttagtaagttgttgtagatattttgaataattatatgtatatattttttaagtattatatatataatatttttatattttgtatatatttttggagatagggttttgttttgttttttaggttggagtgttgtagtatgattggaatttattgtaattttaaatttttgggttttagtgatttttttagttttagttttggaatagttaggattataagtattttttattatatttagttgttaattttttttttttttgtaaagataaggttttattattttgtttaggttgttttttaatttttggatataagttttttgtataggttttttaaagtattgggtttataggtgtgagttattgtgtttggttaatattatgtatttaattttatgtgtttagaaatatgtgttattttaagaaggtgtttataggttttattatattattaaaggtgtttatggtataagtgaagaaatttttagatattagagtaataaaaattatgatgtattagaatggattaggtttatattaaatgtttaatatatagtttgttgttatggttttttttttttttttttttttttttttgagatagagttttattttgttttttaggttggagtgtagtggagtgattttggtttattgtaatttttgttttttgggtttatgttatttttttgttttagttttttaagtagaggaattgtaaggtgttttattatgtttggttattttttgtatttttagtagaaatggggtttttttatgttatggtaggttggttttgaatttttgattttaggtgagttatttgttttagttttttaaagtgttgggattataggtatgagttattatgtttagtttgttatggtttttaaaatatttatagaatagaaattgaagtaagtttatttgtttttatattaaaagtagttagtatggtgttttgtatttatgtattttatggatgttgaatgagttattgaatgaagtggagtttaggttgtgttttaggttttttagtggggttggaaggaatagttgtgaagttgtggggtggtttttgtgtattgggggattttggagttagatggttttttagggttttgaaggagaagagttgtgtttttaataatgattttaatgggaatagagattgttggggattgtaggggttaggttgttattttttaaagttttttttttattatttaagaaggtatttaggtttttttgtgttaggttttaggtaaagtgttggattatttagtaattgggtttagtagtaggatggttttagattgaggttttagggttaaaggattatttttttttttagtgttggtttgggaaaggtaagttttgggtgggagtgtatgttgtgtttttgaagtttggtttttttgttatgtttattttttgtttttattttgtgtttttttaggtttttttttggtgaattggatgttttgttagtttttttttttgtgtttttggttgtggtttgggttttttgtaaagttgttgttattttggagggtttagttagtgggtttttggaggttggttgggtaggtgtggtgtgtggtaggagttgggtgtgtatggttattgtgtgtggaggagatattgttttgttgtgatgggggtttggggtgtttttttatgttgtaggtaagtggggtggtggttgtggtatttgtttattgggagttttttttttttttttttgttgttgttgttttgtatttagtttgggggaggatagaagaaaaaggaggtagaatggatttttttggtttttttttgtgggtgggggtgggttagggtgggttgtgttgttaggtagttttgttgtgttgttaggtagtttggttgttggtgtgggtgatgttggtgttggg

SEQ ID NO: 475 - DNA, 2470 bp, Artificial Sequence
  Description of Artificial Sequence: Synthetic polynucleotide
tttagtgttggtattgtttatgttggtgattaggttgtttagtaatatggtagggttgtttggtaatgtggtttattttggtttgtttttgtttataggggaaggttaaggggatttattttatttttttttttttttgtttttttttgagttggatgtagagtagtagtagtaggagaaggaagggaaagtttttggtgggtaggtattgtagttgttgttttgtttgtttatggtgtgaaggagtgttttgggtttttattgtggtagggtagtgttttttttatgtgtggtagttgtgtgtgtttagtttttattgtgtattatgtttgtttggttagtttttgggagtttgttggttgggttttttgggatggtagtggttttgtgagggatttgggttgtggttgaggatgtagaggaggagattgatagagtatttggtttattgggagaagatttggaaaggtgtgggatgggggtaggaagtgggtgtggtgagggagttaggttttgggggtgtggtgtgtgtttttgtttggagtttgttttttttggattagtgttgaggagaggagtggttttttggttttgggattttaatttgaggttattttgttattgaatttaattattgggtagtttagtattttatttggggtttagtatagaaagatttgaatgtttttttggatgatgaaggggaagttttggggaatgataatttggtttttgtggtttttagtaatttttatttttattgagattattattaggaatatagttttttttttttagagttttgggaaattatttaattttagagttttttgatgtatagaagttgttttataattttataattgttttttttagttttattggaaggtttgaggtataatttagattttattttatttaatgatttatttagtatttatggagtgtataagtatagagtattgtattagttatttttaatataaaaatgaatagatttattttaatttttattttatgaatattttaagaattatagtagattggatatggtggtttatgtttgtaattttagtattttgggaggttgaggtaggtggtttatttgaggttaggagtttaagattagtttgttgtaatatggggaaattttatttttattaaaaatataaaaagtagttgggtatggtggagtgttttgtagtttttttatttgggaggttgaggtaggagaatggtataaatttgggaggtagaggttgtagtgagttgagattattttattgtattttagtttgggagatagaatgagattttgttttaaaaaaaaaaaaaaaaaaaaaaaaagaattatagtagtagattgtatgttgaatgtttgatatgggtttgatttgttttaatgtattatggtttttattattttagtatttagagatttttttatttgtgttatgaatatttttggtaatgtgataaaatttgtagatgtttttttaaaatagtatatatttttaaatgtatgaaattaaatatatagtattagttaggtatggtggtttatatttgtaaatttaatgttttgggagatttatgtaggaggtttgtgtttaagagttggagagtagtttgggtaagatagtgagattttgtttttatgaaaaaaaaaaaaattaatagttgggtatggtggggagtatttgtagttttagttattttaagattgaggttggaaggattattagagtttaggagtttgaggttatagtgagttttgattatgttatagtattttagtttgggagatagagtaaaattttgtttttaaaaatatatatagaatataaaaatattatatatataatatttaaggaatatatatgtataattgtttaagatatttgtaataatttattgagtatgaaaataatttttgtaggaaataaagttgtaggtattgataatattattgtggtttgttgtttgtttttataatttaaagaaatgaaattgttgtgaggttaatagatataaagttatgatttttttaatataaagtttatagatgttgaaattttatggattttagattaagaatgtttgttttataataattttattaattaggttttattgttaatgatttttagataaagaaattaaggtttagaaaaaatttgaatattgatagtttggttttatagttatgtttatgttatgatgtttttgttaaaggagtttataaatatatattatttttttgtattgtaagtttttgattttttattattatgtgaatattttgtttgaattattatttttgttaaaaattttagataaaataaattttatattttattttagtaaataataatttataaatttgtagtattttgaattagaagtgtttagaaagtttagttttagtggtttgagagtaagttttaatagattaaatataaaaataaag

SEQ ID NO: 476 - DNA, 2470 bp, Artificial Sequence
  Description of Artificial Sequence: Synthetic polynucleotide
agttgttttgtttagaagttgattttttgatgtttttaatgtttggtttaattgatttgttttaatggagtttttgttggtgaggagtgagatgttattgattagaatgttgggatttgttgtttaattgttaggagtgagagatattgagatttagaaatttttggaggtgggaggggagagggatagttttggatggaggtggagatgtaagataaagggatggattttatataggaaaaaaaaaaagattttgttgaggtattgaggtgttgtatgattatattttttaaaggagaagttaaaaagtaaggaagtgggaggaggttggaggttaaagtatttaaaaggattatttgggtataatttgtttttttgttggtgtttgtaaaggatagatagttttgtttttaaagtatatgaatgttttttttaagtgattgggaatggatattaattgtttgttaaatgttattaaatgtttttttaaatttaggggatatagaaagaggggtataaaaggagaatttaaatagaaaaagggaggatttggaggtttttgaaagtggggggagaagaaggaggagggataatagagaggaatagagaaggagagtggagagaagataaataaaaataaaaataggaattattgaataattatatattaaaaagaaagtttttttttatggggtatttaaaatattgagattgtaatagtgattttggttatggaagaaagatgtttttttttatttttgtttttgaaagtttttggttttgttattggtgattaaaattttattaggttaaagagtgtgtttaattgtttgaagaatgtagtagatggaaggtgggttttgttatgttgtttgttttttttgttggagagaatgaaagaaatgtgtagagttagagatttttgttgagttagatttttttttgttgttttaggttattggttatttggtaaagatttgagtaaggaatgtagggttattgtttgggttaataaatggagtttgtttttttttttttggatgttgttgtttggttgatgtttttggtaatttatttgtggtgtatgtagaggagttttttttttttttttagattatttgttttgattaatttgattttttaaatatatttgattgtattttttaggtggatatattaataggttatgggttggagaggagtgggtgatgaggagagggatttaaatttgtgaatgtttgggttgggttggagttgtggggggtttgggaggagagaggggagaagagagaaggaaggagagtgtttgttgggatggttgagttgttttggtgagtagttttggggttgtatgtttttgtgggagatgttgttgttgtttttaggttggtaagagtggttttaatattattgttttttatttttttttttgtaaatttttagagaaatgtttttggtttttttgttgtgatatttttagtttgtatttttttatagtttaggtggtgtgtttttgtatgttggagtgttggttgttagtaggatgtttttttttgtgttgatttgtttttttttgttttgttgttgttgtttttttgatatttttgtttttattatttttagtttggagagatgttatttagttgtggtttgtatttgtggtttggggttatgtgtggaagaggggtgttagtttggattttgtttttggtagggggtgttttggagtggagagtgaggtgaatggtatatgagtgtgtgggtagtttattttgaagtttgagttttttatttgagttatttttgtttagttttatttgggttagtgtttggtgagtgagtttatttgtggtttttgtggttgttttttttttgtatttttgtatttttttgttgattttttttttttgggatttgtattttgttttattaattagagtttgattgtttttttttatgtgattttgggtgggttgaggatttgttgttttttaaatgttagagggatgtgggtggtagagtttgagaggtggttgttgggttgtggggtgttttgattttttttttattttgtttttttgggttttatttgtttgtttttggatttttgtttttttttgttttttggttttttagagttttttttttatggtagtagttttttgtgtttttggtgtagttttttagtggatgatttttttgttttggggttgagtttagtttttggatgttgttgaaatttttgagattatgtgtgggtttggttgttgtttttttgttgggtgttattgttattgttgttgtttttgttgttgttgtttgtgggatgtttagtagtttgttgtttggtttttgtgattttgtgttttttggaagttgtttgttgttgtagagttgtatgaattagttatggtgttgtgggagtttttgtggtagtgtagtagttggatattttgtgagggtttttgtt

SEQ ID NO: 477 - DNA, 2470 bp, Artificial Sequence
  Description of Artificial Sequence: Synthetic polynucleotide
agtaaaagtttttgtaaagtgtttagttgttgtattgttgtggggatttttatagtattatgattagtttgtgtaattttgtagtagtaaatggtttttgaggaatataggattgtgggggttgggtagtgggttattgagtattttgtggatggtggtagtagaggtggtggtggtggtagtggtatttggtggggaagtagtagttaaatttgtgtatgattttgagagttttagtaatatttagggattgggtttagttttggagtgagagggttgtttgttgagaagttgtgttggagatgtgggaagttgttgttataaggagggagttttgggaagttggaggataggaggagatgggagtttaggggtagatgagtggagtttgaggaggtagggtggagggagagttaaggtgttttgtagtttggtagttgttttttgagttttgttgtttgtatttttttggtgtttgggaagtagtaggtttttagtttgtttggggttatgtgggaagaggtagttgggttttgattggtggagtaggatgtaggttttgggagggaggggttgatgaggaggtgtaaggatgtaaggaggaggtggttgtggaagttatagatgggtttgtttgttaggtgttggtttgagtggggttaggtggggatggtttaaatgagaagtttgggttttagggtgggttatttgtatatttatatattatttgttttattttttgttttaggatgttttttattgaaggtggggtttggattagtgttttttttttgtgtgtgattttgggttgtgagtgtgggttgtggttgggtggtgtttttttgagttggagatggtgggggtggaggtgttagaggagtagtagtagtagggtagagaggggtgagttggtgtgggagagggtgttttgttggtgattggtgttttagtgtgtgggagtgtgttgtttaggttgtagggggatgtaggttgggaatgttgtggtggagaggttagggatgtttttttagggatttataggaaagagggtgagaggtgatggtgttagaattgtttttgttgatttggaagtaatagtagtattttttataagagtgtgtaattttaaggttgtttgttgaggtagtttagttattttggtaggtgttttttttttttttttttttttttttttttttttttaggttttttgtagttttgatttagtttaagtgtttgtaggtttgaatttttttttttattatttgtttttttttagtttgtagtttattagtgtgtttatttgggaggtgtggttagatgtgtttggaaggttagattggttgggataagtggtttgagagaaagagaaaggtttttttgtatatgttgtgggtgggttgttgggagtattggttgggtagtggtgtttgggaaggggagagtgggttttatttgttggtttaggtagtgattttgtgttttttatttgggtttttgttggatggttggtgatttggggtgatgagagaaggtttaatttggtaggagtttttggttttgtgtgttttttttattttttttagtgggaagggtaaatggtatagtgggatttgttttttgtttgttgtattttttaggtagttagatatattttttagtttaatggaattttagttgttagtaatgggattaagagtttttggggataagggtggagaggaatattttttttttatgattggggttattattgtagttttagtgttttggatgttttatagggaagagttttttttttggtgtgtgattatttagtgatttttgtttttgtttttgtttattttttttttgttttttttttttatttttttttgttatttttttttttttttttttttttgtttttaaaagtttttggattttttttttttttatttaaattttttttttgtgtttttttttttgtgttttttgaatttaggagagtatttgataatatttaataggtaattagtgtttatttttaattatttaaaagaggtatttatatattttgaaaatgggattatttattttttgtagatattagtagaaaaataaattgtatttgagtaatttttttaagtattttaatttttaatttttttttatttttttgttttttaattttttttttgagagatgtgattgtgtagtattttagtgttttaatgaaattttttttttttttttgtgtgaaatttatttttttattttatatttttgtttttgtttgagattgtttttttttttttttatttttaaagatttttgaattttagtgttttttatttttggtaattaagtagtagattttagtattttagttggtggtattttgttttttattgatgaagattttattaaaatagattaattagattagatgttggaggtattagaaaattggtttttagatagagtagtt

SEQ ID NO: 478 - DNA, 2470 bp, Artificial Sequence
  Description of Artificial Sequence: Synthetic polynucleotide
atatttaaattgtatatttggtttgtaatatattatatatttaaaagaattattatttttttgaatattattaatattaataatagtattatagtgattaagagtggatttaaataaaggttggtttgaaatttaggtttgttatttattagtaagtttttaaaaattttgagtttttagtttttttatatgtgaaatggagaaaataaatttgtaaaattaattaaatttgtttatttatatttttttttttagtgtatattaattggtattttttgttaggttagaatgtgtttttaattatgttttaaatttgttttgtgttaattttattgttagaattttttttattttgagaattagaaaaggaaatattatgtttggtaatgtttatattttttaaaataaatttgtaggaaagaatatttagtaagtgatgagagtagtaatgattgtttttattattttaaatttataatattattttttttagagttttttaagtattgtagataattttttatttattaaaaaataaattgtaattataagtatttagggttgatattgtttttgaattagatagtgtttatattagttgtataagattaatttaaagtagaggatgaaattttttttttgaattttttttagaatgtaatttagtgaatatattaaaattaaattttttttgaatgggagtaatttttatggattaatttgtaattttttagattatatttaaggtaatgtagaggttgttgtattataggttttgtgattagagattattggatttgtttttggaaaagttatttatgattttttgggttttggtttttttattttttatattggtttaataatgattattgtagagttgttatggaagttaaatgaatttatgtattataagtgattaatataatgattgatatttagtgatttattaataaattaaaatatttattattaatatgatagagaaggtgttgttaaaatagataataggtttttggaagaggtgattaaatggatgtaaaatttatggattgtttattttgtttatttttgttgtgttttttggttgtggtatatatatgtgtgggtataaaattgtaaattttatgtagttgtgtagtgtatgtgtagaaggtttagatatgaaatgttattttagtaatgtgtttagagaagttttgatgttgttttggaagtaagttgttgttgtttgatttttgggtgtttgggatggatgtttatatttgtatttagtagtattggaaggggtttaggttttttgtagtatagtttatttttagattgtttagttttttataatatatatttttatggaaaagggtatttttttttgttagaaaaagtgttttagtttggtttgggttggtttttattttatgttgttgtaagtaggtgaagttttttttgtttttttttttggggtaagtggaaaggagtttggtagggggtttgtagtggtttgtataggggaattgggtagtgagagagttttaggtaattttgggggttgttttatagaagtaggtggggattgatagtggttttttggtttagggaggagagtgtggttgtgggtttttttttttagtttggaggttgtagttgtttgagttggtttgggtgggggtggggtgggggtggtgtggagggtatggagattatggtggtgttatttgggatatttagggttttgaggttttgggtggtttttatgtgagattgtaaattatgataataggtagttatttgaggttaaataaaaatggagtgggttttttgtgtgttgttgttttttgtgtttttggtggttttttttgaggtttttggtggttttatgagtttgtagtagttggtggtgatgttgtttttgttttatttttttgtgtaagtgtgaggttgttggtagtgtggtgtatgttttggttgtttttggtttttgtgtaaaatttttattttgtttatgtgaagttgttgttgttttagagagggggaaagagttgtgggaaaagttggggagtgatgattgtggtggttgggtgtgtttttttattttttttttttttttttttttttttgttgtagtttggagttttggtttttttttttttttttttttttttggagttggtttttttttttgttttgttttttttttgtttgtgtatgttatttgttgtggggtggttgaaggggatgttttgtttttattagaggtatagtgtgaaggggaaattttgatattggaaggaatgagaataaatatttaattatggatgtattgaattgtggttgggatagatattttgggaatttgaggtggattgggtgatgaggtgagtgatttttttttttaatttttgttttagggtttttgggggagtttgagttgagagaatttttaaattttttgggaaagtgtgtgaggttt

SEQ ID NO: 479 - DNA, 2470 bp, Artificial Sequence
  Description of Artificial Sequence: Synthetic polynucleotide
gagttttgtgtatttttttggaaagtttgggggtttttttaatttaggtttttttgggagttttggggtgggggttggaagaaggggttatttattttgttgtttggtttgttttgggtttttgaagtgtttgttttagttgtggtttagtgtgtttgtaattaagtatttatttttgttttttttagtgttgaagttttttttttgtgttgtgtttttggtgaaaataggatattttttttggttattttataataaatagtgtatataagtgggggagaagtggggtggagggagaagttggttttgagggggaggaggaaaggagaggagttaaaattttggattgtgataggggggaaaggagaagaaaagaaaatgagagagtgtgtttagttgttgtagttgttattttttggttttttttgtagttttttttttttttttaaggtagtgataattttatgtggataggatggaagttttgtgtggaagttgggaatggttggagtgtgtgttgtgttgttggtagttttgtatttgtgtagggaggtggggtgggggtgatgttgttattggttattgtgggtttgtgaggttgttgggggttttgggggaggttgttagggatgtggggggtggtggtgtgtgggggatttattttgtttttatttgattttgggtgattgtttattgttatggtttgtgattttgtgtggggattgtttagggttttggggttttggatgttttgggtggtgttgttgtaatttttgtgttttttgtgttgtttttattttgtttttatttgggttgatttgagtggttgtagtttttaggttgaggggagggatttgtgattgtgtttttttttttgggttggagagttattgttgatttttatttgtttttgtggggtagtttttggaattgtttggaatttttttgttatttagtttttttgtgtaggttattgtgggttttttgttggatttttttttatttattttaagggaggagatagaagggattttgtttatttgtaataatgtgaaataaaaattaatttagattagattggggtgttttttttgatgggaggaaatatttttttttgtggagatatatgttatgaaggattaagtggtttggggataggttgtgttgtgaagggtttgggttttttttagtgttgttgggtgtaggtataggtatttgttttagatgtttaaaggttaggtagtaatgatttatttttaaggtggtgttagagtttttttaggtatattgttgaaatgatattttgtgtttaagttttttgtgtatgtattatgtgattatataggatttatgattttatatttatatgtgtgtatgttataattaggggatatagtaaaggtagatggaataaataatttataaattttgtatttatttaattattttttttaaaaatttattgtttattttagtggtattttttttgttatattgataataaatgttttaatttattgataaattattgagtgttaattattgtattggttatttatggtatatgagtttatttaatttttatgataattttatggtggttattattaagttggtataaaagatgaggaaattaaagtttaaagaattatgagtgatttttttaaagataaatttagtggtttttaattataaagtttatgatataataatttttatattattttaggtgtggtttaagagattatagattaatttgtagaaattatttttatttaaagaaagtttagttttaatatatttattaagttatgttttgaaaaaggtttagaaaaaagattttattttttattttaggttggttttatgtaattgatatgagtattgtttaatttaaaagtagtattaattttgaatatttatggttataatttattttttaatgagtggggaattatttataatgtttaagaggttttagaaaaggtggtgttgtaaatttaaaatgataaaggtagttgttgttgtttttattatttattgggtgtttttttttgtagatttattttggagggtgtaggtattgttaggtataatgtttttttttttggtttttaaggtagaaagggttttggtagtggggttggtataaagtggatttggagtatggttgagagtatattttggtttaatgaggaatgttagttaatatatattggagagaaaaatatgaatggatagatttaattaattttgtagatttattttttttattttatatgtgagaaaattaagggtttagaatttttagaagtttgttaataaatggtagatttgagttttaagttagtttttatttaagtttatttttagttattgtgatgttattattagtattaatggtatttagaaaaatagtaatttttttaaatatgtaatatattataagttaaatatgtaatttaaatgt

SEQ ID NO: 480 - DNA, 947 bp, Artificial Sequence
  Description of Artificial Sequence: Synthetic polynucleotide
ttgttgtttttaggggttttggttttgattgatatttgggtgggtgagtgtggggtttagagagaaatggtttttgtggggaggagtgaggggtttgtttggtgggggtgtaggatttagggagttgtgtttggaggagggtttggtgggttttagtttttttttgtttttaggtttttattttttgaggtattttagtattgttgtgttgtggtttggttgtggggagttttgttatattgttgtggagtatgtagatgatatgtaatttttgtggtttgatagtgatgttgtgattttgaggatggagttgtgggagttgtgggtggagtaagaggggttgtagtattgggagtggattatagggtatgttaaggttaatgtatagattgattgagtggttttgaggaatttgttttgttgttataattagagtgaggttggtgagtgaatttggttgggggtgtaggttatgattattttttatttgttatggattgtttgggttttttagagtttttggatttgaaatttattttgaggtagtgggatttgtttagattttttatttgggagagttttaggtgtttttatttaggtttatttttagtttaggttaaaatttttgtgggttgggtggggagggggtggggttagttgggtggggttgattgtggggattggttagggttttatattttttagggaatgaatggttgtgatatggggtttgatggatgttttttttgtgggtattattagtatgtgtatgatggtaaggattatatttttttgaatgaggatttgtgtttttggattgtggtggatattgtggtttagattatttagtgtttttatgaggtagaggaatatgtagaggagtttaggatttatttggagggtgagtgtttggagttgttttgtagatatttggagaatgggaagga

SEQ ID NO: 481 - DNA, 947 bp, Artificial Sequence
  Description of Artificial Sequence: Synthetic polynucleotide
ttttttttattttttaagtatttgtggagtaattttaggtatttgttttttaggtaggttttgaatttttttgtatatttttttgttttatagaagtgttgggtgatttgagttatggtgtttgttgtggtttaggagtgtaggtttttgtttagggagatgtaatttttgttgttgtatgtgtgttggtgatatttgtggaggaggtgtttgttgggttttatgttgtagttatttattttttggagggtgtgagattttagttggtttttgtagttagttttgtttagttagttttgttttttttttgtttaatttgtggggattttggtttaaattgaaaatgaatttgggtaaaggtgtttgggatttttttgggtggagggtttgggtgggttttgttgttttggggtagattttggatttggagattttgagggatttgggtggtttgtggtggatggggggtggttgtgatttgtgtttttggttgggtttatttattagttttgttttggttgtagtggtggagtaggttttttagggttatttggttagtttgtgtgttggttttggtgtattttgtggtttatttttaatattgtggttttttttgttttatttatggtttttgtggttttatttttggaattgtggtgttgttgttgaattgtaggaattgtgtgttgtttatgtattttatggtgatgtagtggggttttttgtggttgggttgtgatatagtggtgttgaaatattttaaggagtgggagtttgggggtgaggaggggttgagatttgttagatttttttttgggtgtggttttttgagttttgtgtttttattgggtgggttttttatttttttttatagaggttgtttttttttggattttgtatttatttgtttaagtattggttagggttagggtttttgagagtagtag

SEQ ID NO: 482 - DNA, 3120 bp, Artificial Sequence
  Description of Artificial Sequence: Synthetic polynucleotide
aattttaagtttaggttgggtatagtggtttatgtatgtaattttagtatttggagggattgaggtgggtggattataaggttaggagattgagattattttggttagtatggtgaaattttgtttttattaaaaatataaaatttagttgggtatgatggtatgtgtttgtagttttagttatttgggaggttgaggtaggagaattgtttgaatttgggaggtggaggttgtagtgagtggagattgtattattgtatttgtttggtgatagagtaagattttattttaaaaaataaataaagaaaatttgaagtatagtatttttttaaattttaaatagataatagaaattggtttttttttatttaaattagaatttaagtttaattttatatatttttgatagtttggattttgttttttaattttataaaattgggaatttaagtattatttggtttgatttaaatgtaatgtagaatttgtattaaaatattatattaaagttttagatttgtagtagttaatagtatttttatgtatgtgttagggattgttttaaatattttatatatattaatttttttattttgtatttttgtttttgttttatatagtaggaaattgaaatattgagaggttaagtaattaaagttatagagttagagtgataggagtaaagttttaatttaggtaatttagatttttagagttttgatttttattattaagttgttagtatagtttttttggtaattatttttaatttaaatataatttgagtgatttatttaataagttattattttgataatttagtgatttgtaatgtaaaattatttattgtaatttatttaatattattgtttttttgtgttgtaaaaattatagtaattgagatgtaatttattatttttttttttatttttggtattttgtgttaatttttttgttttgtggattttttttgattttttattatgtgtgttaattgttattaatttttttgtttgttggggattggggttgtgagggtatatttttgaggggtatggggttagggttaggtaggttgtgtggttgggtggggttttgtgttttattgtggagtgtgggttgggaagtggagagagaagtagttgtgtaatttgttggatgtggattagggtgttttttatttttgttgggagtttgttgattggttgggtgtgggtgtatgtgattgatatgtggttgtattggtgtagtttgttagggtgttattggagatagaatggaggtgttgttggatttggaaatggggtaggtgttggagttattatggttaggtttgttgtggggggaggggggaaggtggtttttttttgtattgttttaaattgatggtttttttttggtatagggtttattgtagtatgttaaatgaggaggtaggggtgttgtttttttgttttttattgtagtattggagatggattttttgtattttggatttagggtttttgatagaagaggaagaagggggaggggtagaagtgttaaggggagtttgttgagaaaagttgtttttgaagttagaaggggtttttgtttttataatgttatttgatagagtggaataatagtatttaaggaaatgggtagaggataataaagaatggagtatatttatggtgaggagtaaaagttttattttattgaaaggtttttttttttttttggtgataaggatatatgtattggtggttaaaagagagaggagataaaattgttgtagatggttgatgtgaatttagtggaaagagttattggggatgagagaaagaggaggaggtaggtattgtagagtgtgagtggtggtgttggttggtgaaatattggttattagtagtgtgtttgtttttgtaaaatatttaagtaaattttttgtgaatagggtggtaaatagatattagtgtttttgttagttataaaatgtagtggtagtggttttttgtggatgattgtagtagtgttttttttttttttgttaggttgaaaagataattgtagaggaataagaaattttgtagtaaatgttggggtagaagtttatttataagaagttatagtttataaatgtagtttgaatagtagaaaaaaaattattgttttttaaagtaggaataatgttaggttatgaatgttttgttattggaatgtattggatattttgattttatattatgaaagtgatgtttaaattttttgatttaatataaattttatatgaaattttaataaattatgtatgaaatagtggatttttttttttgttagtgaagtttttatgttattaattaggttatttaagagtaaattattttataatgtaaattattttgttaaaaattatggtgaataaatttttgtaggtttaatatttaagatttatagttaagtaattttatatttttttttggttgtttttagataatattgaataaatatttaagatattaatttagtgtgtaaatattttaaattaaagtaatatggttttttttttagatgtatttttgtttagtgagtatttatgagatatatttttgatataaagtgttttttattgagttttttttttttttatttaaatgtaaaagtttatttttatgtatatttatagtagttagtttgttatatttttttattttttgaataaggatggtagtggttttgtaaagttttttagggttagtgatagtgttttttaaataatgtttatgtaatagaaagttttaagatgatttattatattgttttagtaatatttttaagataatgtggaattgggttggtttagataaataagattatataagttttttattgataaatttaaatagttttttaaaaaattatttttgttttaagaattatttgattatggatattagggttaatagtatttaggagttgggtgtggtggtttatgtttgtaatataagttaaataggaggttgagggaagttgaggtaggaggattatttgagttttggtgtttaagattagtttgggtaattaagtaagattttattttaaaaaaaagtatttagagttttttttttaaaatttgat

SEQ ID NO: 483 - DNA, 3120 bp, Artificial Sequence
  Description of Artificial Sequence: Synthetic polynucleotide
attagattttaaaaaagagattttaagtatttttttttgagatagggttttgtttggttgtttaggttggttttgaatgttaaggtttaagtgatttttttgttttagttttttttagttttttgtttagtttgtattataggtatgggttattatgtttggtttttaagtattattaattttgatatttatgattaagtaatttttaaagtagaaataattttttaaagaattatttaaatttattagtgaaaaatttatgtagttttatttatttaagttagtttaattttgtattattttgaaaatattattgaaataatataataggttattttaagattttttattatataaatattatttaagagatattgttattgattttggagggttttataaagttattgttatttttgtttagggagtggggaggtgtggtaggttggttattataagtatgtataaagataggtttttatatttaggtaaaggaaaaaaaagtttaatgaaaaatattttatattaagagtatattttatgagtatttattaaatagaaatatatttagaagaaaagttatgttgttttaatttaaaatatttgtatattgaattaatattttaaatatttatttagtgttatttaaaagtaattaaagagaaatataaaattatttaattataggttttaaatattaggtttataaaaatttgtttattataatttttgataaagtaatttatgttgtaaagtggtttgtttttgaatgatttaattaatggtataaaagttttattaataaaagaaaagatttattgttttatatataatttattaagattttgtataggatttatgttaaattaaagaatttgagtattatttttgtgatgtagaattaaagtgtttaatatattttaatgataaaatatttatagtttgatattatttttattttaaaaaatagtaattttttttttgttgtttaggttgtatttataaattatggttttttgtaaatgggtttttattttagtatttgttgtaaggttttttatttttttgtagttgtttttttggtttaatagagggagaaaaagtattgttgtagttgtttgtaaaaagttattattattgtattttgtaattaataaagatattggtatttgtttgttattttgtttatagggagtttatttagatgttttataaaagtaggtatattattggtgattagtattttattaattaatattattatttatgttttgtagtatttgttttttttttttttttttatttttagtagttttttttattagatttatattagttatttgtagtggttttgtttttttttttttttggttattaatgtatgtgtttttgttgttagggaggaaaagaagttttttaatggggtagagtttttgttttttgttatgaatatgttttattttttgttgttttttatttgtttttttagatattgttattttattttgttaaatggtattataaaaataaaaattttttttggttttaaaaatagttttttttagtagattttttttaatatttttatttttttttttttttttttttttgttaaaaattttggatttgaagtataggaaatttatttttagtgttgtagtggggggtggggggatgatgtttttgtttttttgtttggtatgttgtagtggattttgtgttaaggaaaggttattggtttaagatagtgtgagggaaaattatttttttttttttttttgtagtaagtttggttatggtggttttagtatttattttatttttgagtttggtagtatttttattttgtttttagtgatattttggtgggttgtattaatatagttatatgttggttatgtgtgtttatatttagttaattggtgggtttttgatgggaatggggagtgttttggtttgtatttagtggattatatagttgtttttttttttgttttttgatttgtattttgtagtggggtatagggttttgtttaattgtatagtttgtttagttttagttttgtattttttgggggtatgtttttgtggttttagtttttagtaagtaaggaagttgatggtagttgatatgtatagtaaagagttgggggaggtttgtagggtagaaggattagtataagatgttggaggtgggagggagagtaataaattatattttgattgttatgatttttgtagtatagagaaataataatattaaatgaattataatgaataattttatattataagttattgagttgttagagtgatgatttgttagatagattatttgaattatatttgaattaaaaatagttattagaaaagttatgttagtagtttagtagtggagattagaattttggaagtttgggttgtttgagttgaagttttatttttgttattttagttttgtaattttagttatttaattttttagtgttttaattttttgttgtataaaatgggaatagaagtatagaatagaggagttaatatatatgaagtatttagagtagtttttgatatatatatagaagtgttgttagttattataaatttgaggttttaatgtagtattttaatgtaaattttatattgtatttaaattgaattaggtgatgtttaaatttttaattttatgaggttgaaggataaaatttaaattgttaagaatatataaagttaaatttaaattttggtttaaatggggggaaattagtttttattatttatttaaaatttaaaaggatattatattttaagttttttttgtttgttttttgagatagagttttgttttgttattaggtgagtgtagtggtgtaatttttgtttattgtaatttttattttttgggtttaagtgatttttttgttttagttttttaagtagttgggattataggtatgtgttattatgtttagttaagttttgtatttttagtagagatggggttttattatgttggttaggatggttttaattttttgattttgtgatttgtttattttggtttttttaagtattgggattatatgtgtgagttattgtgtttggtttaaatttaaagtt

SEQ ID NO: 484 - DNA, 2501 bp, Artificial Sequence
  Description of Artificial Sequence: Synthetic polynucleotide
gtgttttagtttttgaatttatgttgtttgttattatattgtattgtttgtggatgatttatttgtttttgtagttttatttgaagaatttttttttttttttttttgaggtttgttttaaatattattttttttgtgaagattgtttggtgttttttaggagagagtgtgatttttttttttaggaatggtagtattttaaatatatatattttgtagtatattttattttgtatggtaatggtttgtttgtgagttttattttgtattagagggtgagggttttgaagatagtgttaggttttatttattttgatattttataatatttattatatgtttgatgaatgaatgtatagggggatggttgggtgtattttttttaattttttaattttttgaaataaataataaaattttatttttttttagaagttttggtatggttttttttattttgttatagttattgataattatttttattttttgtgtaatttattaggtaagaagtttatgtagatttatttttagtagtttatatgataaataaatattgtgtttgatttttaaatattaaattatagtatattatagatagatatagagttattatttaaagtatgatattttaattttaaaaggttttttttgaagaatattataaattttttttttttttaagatttgttgggtaggaaagatgggagaaaatgaattaatgtttatatagaaaggaggataatgggggtaaaaataatagatgaatgtatgggtggatgagagaatggataaaatgataggtggatatgttgattttggatagatgggaaatgagtggatatattaataaatagatatgtgggtggatgggtggagaagaggatggtggatggttgtggttttatgaagagatgtgaaaaaggaagtgtggaatgatggatgagaagttgtatgggaagatgaatagaagaataggtggttgaataaattaaaaggtgtgtggttggatgaatgaatgagtgggatgatagatggatttaagtggttagtggatggataggaggatggatggatgtgagagttttagaaggatataaggaaagatgggtggatagatggatgggtggatggaaggatatttaggaggatgaatgagtatgtgtgtggagagaggtgtttatttatattggtttgaatatatgggttagttgagttaaatgttagttttatgataggttattagtagttttttttgagttgttttgttaagaagttaaaatttatttaagttatgtggatttgttattgaggggaaaaagaatgagttttttttttttttatttggaagatttattaattttttattttttattttttattgtgggtatggaggtattgtgttatttagggtaagattttgttttttttttagttttttttttaggatatttaatattttgtgaaatttagagattttgttttagttggatttagagaaatttagtgggaaaggagaggttaaaggttgaatttaatggtgtaaggttttatggtttggttattttttgttttgatgttgtggggttagtgggagaagaaagttagtgtgtttttgggtgtaggggttagtggggtttggaggtataggtattttgtgatattttaggttttttgatttatgtttttggtagttttgattatttatagttttagtagagtatggggtgggggtagaggggtttgtttgggagggttgttattttttaaaatttttgtgggttgtttagttatagttttttttgtttgggtgtgttttttgtttgttttttttttttgttttaggttattgtttttaattttgaataaaaattgtagttaatttttgaggtagttttattgtttagtggattttagtttttgttaggtttggtttgttatttttgttttgttttttgttggtttttgttttgtgtttagggattttttagttttttttgtttgtgttttttgtttgttttggatattatggataagttttggtggtatgtagtttggggattttgttttgtgttgttgagtttggtgtagattggtgagtgtttgttgtagtttgggtagtaagatgggtgtggggtgtttagtgtggatttggtggtagtttttttggttgagttggttttgggggattggagttaagtgagttgtttgtgaagtgtattgggttttggaaagtagggttgggatttgtgttaaattgttggagaatgtgtttgtggaagtattatttggttgaaagaaaaagagaaagagaagaaagtttgttgggtaggttgttggtgtgtagttttgggtgaggttgttagagttgtagtatatggtagaaagtaattgtttttttggatgtgtatagttgttgtttggattaataggtttttgtgtttaagggtttgttaagttttattgggttgtgtttaggtagggtagagttgggtggggta

SEQ ID NO: 485 - DNA, 2501 bp, Artificial Sequence
  Description of Artificial Sequence: Synthetic polynucleotide
tgttttgtttagttttgttttgtttagatatagtttggtggggtttggtgagtttttgggtataggagtttgttagtttagataatgattgtgtgtatttgggagaatggttattttttgttatgtgttgtagttttagtgattttgtttaaaattgtgtgttggtagtttgtttaataaattttttttttttttttttttttttttaattaaatggtgtttttatagatatattttttaatggtttagtgtaaattttagttttgttttttggagtttaatgtattttgtagatagtttatttgattttagttttttagggttgatttagttggaggggttgttgttgggtttgtgttgagtattttgtatttattttgttgtttaggttgtggtgggtatttattgatttgtgttaggtttagtggtatgaggtagagtttttaggttgtgtgttattaaaatttgtttatggtgtttggagtgaatggagggtgtgggtgaaaggagttggaggatttttgggtgtggggtaggggttggtggaggatgggatgaggatggtggattgaatttggtagaggttggggtttgttgggtaatgaggttgttttggaagttggttgtagtttttatttgaggttgaaaatagtgatttaagatggagggagggagtgagtgaaggatatatttaagtaaggggggttgtgattaagtagtttgtagaggttttaagaagtagtagtttttttgggtgggtttttttgtttttgttttgtgttttgttgaggttgtaaataattggggttgttagggatgtgggttggggaatttggagtgttgtggggtgtttgtgtttttgagttttattggtttttgtgtttagagatgtattggttttttttttttgttggttttgtggtgttaggatagaggatgattgaattgtaaaattttgtattattgggtttagtttttggtttttttttttttgttaaatttttttgaatttggttggagtaagatttttgggttttataggatgttggatattttgggagaggagttggagagagggtgaggttttgttttgggtggtgtagtgtttttgtgtttatagtggggagtgaggggtggggagttggtgaattttttaagtggaaagagggagagtttattttttttttttttaataataagtttatatggtttgaatgaattttagttttttggtagaatagtttagggaaagttattgatggtttgttatagggttggtatttggtttagttaatttatgtgtttaagttagtgtgaatgggtatttttttttatatatatgtttatttatttttttaaatatttttttatttgtttatttatttatttatttatttttttttatgtttttttggggtttttatatttatttatttttttgtttatttattaattatttaggtttatttattattttatttatttatttatttaattatatattttttaatttatttaattatttatttttttatttatttttttatataattttttatttattattttatatttttttttttatatttttttataaaattataattatttattatttttttttttatttatttatttatatatttgtttattgatatatttatttattttttatttgtttaagattaatatatttatttattattttatttatttttttatttatttatatgtttatttattatttttgtttttattatttttttttttgtgtaaatattaatttatttttttttattttttttatttagtagattttaaagagaggaagagtttgtaatattttttaggggaagttttttgagattgaaatattatattttgaatgataattttatatttatttataatatattatggtttaatgtttggaaattaaatgtagtatttatttgttatgtgaattattaaaagtaaatttgtatggattttttgtttggtgagttatatagaaaatgaaagtgattattagtggttgtggtaagatgaaaggaattatgttaggatttttgagggaaggtaagattttgttatttattttaagaaattgaaaagttgagagaaatgtatttagttatttttttatgtatttatttattagatatgtaatgagtgttgtggggtattgaggtaaataagatttggtgttatttttagagtttttattttttggtatggaataaaatttataagtaggttattattatgtaaggtgaaatatgttgtaaaatgtgtgtgtttggggtgttattatttttagagaagggagttatatttttttttggagaatattaggtagtttttataggggaagtgatatttgaggtaggttttaaaggaaaaggaggaggaattttttagatgaaattatagggataagtaagttatttataggtagtatagtgtagtgatgaatagtatggatttaggagttagaatat

SEQ ID NO: 486 - DNA, 2501 bp, Artificial Sequence
  Description of Artificial Sequence: Synthetic polynucleotide
agatttatttaaatttaagaatgagaatataaatttatattttgaagtgttttatagaaaggtttattttaatgtttggagtatatattttaatgaatatttattttattttatttttttttatttttgaattaagtaattttgaatttaaagttgttatgattagtattgaaaagattattggattattaattgtgtgattttgggatagtaattttttgtattttagtttgtttatatgttatatatgaaggttgaagtttgattttgttttgtgattattattttaaatatttgatgaaattaaattttagtgtttggaatggtagtataataaatttattaagaataaataatttattgtaaaaatatattgatttttaaatgatgtaattgatagttatattattgtagagggttgataaataataaaagaaatgaaagatgtatatggtgagaattgaaattattttgataagttttttatttgtttattatttaaaattaatgattatgttgaatgtttataaattataaaatataaaagaaattttataaatgtgtatgtataggagtttaagttattaaaagttttaaagtataagtttaaattaaattaattaaagaagttgagaggaaaaattggtttttatttttaattattattgttttgaggttttatgtttaatataattttttaagtagaggttttagagagaagagttgtgaggatatttttatatttgtgtagaaggaaaagtttgttatttattttagtatttttagtgttatattgatgtgtattttggatttattttgtttttattgtataaatttatatttgattttaaagaaaaggaaaatttaaagttttttttttttaaggggatagaaattttttgtgttaattgtttgatttttttttttgtaaggttttattggaaattttttgtaatataatgtaggggatttttttatgtgttgatgttgtttatatagtggggtgggtttgattgaagaaaaaaaattgtatatatgtatgaaagattatggttttatttttggaaagtatgaaaggtgattgatatttttaagaagtttttgttatttaggaaaattattaaatattttatttagagatatttggaaagattgaaggaaaggaagaatgaagaaagtagaatttagatttatgtggggagagatttgtggtagaggaaaagtattttttttgaatttgataagggatttgtttgggggaattttttgtttagttttttattattagggttttttgaagttgggttttttattgggtagttttttgggagtgtagtggggaatttttatattttttttttaggtttttgaaggattttgtttttttagtgttttttttaggttggtaggagttttgagtttgatatttttttttgatgggataggtaagttttgtgggtgtgtaaatatgttgtaattaagttttttgttgattttatagttttgtgtgtttttgagaagaagtgattgtatttaattgtttattgttggtttgttttttaagagtttgggggttttttttttttaatttagaattagttgtatggggggtggggaaatgggggtggggaaggagtgggagggtagtggtttttgtgagtagagtgatgttattgagtgagtttttgaatggggagtgttgttgtttttaagttgattggtattttttgttaggaagaaatgttaagaggtgggagtgtttggggagggaggtaggtggtttttattgtaggtgtggggagttgtttttttgtttttttgtttgttttttaagtttggatttttaggagtggttgaagttgtggagtgtttttggagtttgtgaatgaatttttttttttttttttttttttttttttgttgagttttttttttggttttgatggtatagtgatataatgatgatgggtgttataatttgtatttgaatttgtaggtgagttgttttgagtttttttggggaagaattttaggtgtgtggatgtaatagttgagaatattaggtgttgtggataggagttgggattaagatttttggttagttttgtatttttttgtattttttagtattgttttgtattttttgtatttttttttgggttattatgttttttatgtgatttgtttgggtaatgttgaatttagttgtgtagtgttgtagtgaattttttttttaaattgtaataagttgttttttaaggtaattatgttttttttgttttttttttaaaaaataaaaataaaaaatttatagaaaaaaatttgtgagtttagaaaaaagaagtaattggtagaaggttttaattaaggtaaagagttgtaaggtgaagttaagaaaatgtaggtatttaaaaaatgtaggtaatttttataagggtttttggggagaggtatatagagggattttggtgttgaaaaagatttagataaaagaaatttag

SEQ ID NO: 487 - DNA, 2501 bp, Artificial Sequence
  Description of Artificial Sequence: Synthetic polynucleotide
ttgggttttttttgtttgaattttttttaatattaaggtttttttgtatgtttttttttaaaagtttttatgaaagttatttgtattttttaagtgtttatatttttttaattttgttttatagttttttgttttaattaaagttttttattaattgttttttttttttaagtttgtgggtttttttttataagttttttgtttttgttttttaaggggggaataaaagaaatgtgattattttggaaggtggtttattgtagtttggggggaaaatttattgtagtgttgtgtgattgggtttggtgttgtttaggtgggttatataggaagtgtggtggtttggggaaggatgtggagggtgtgggatggtgttggaagatgtgggaggatgtggggttggttgaagattttggttttagtttttgtttataatatttaatgtttttggttgttgtgtttgtatgtttggagtttttttttagaaaggtttggggtagtttgtttgtaagtttaaatgtgggttgtgatatttattattattatattattgtattgttagagttgaggaggagatttagtgagaagaaggaggagggagaggaggagggtttatttataggttttaaaagtgttttgtagttttagttatttttaagagtttaggtttggaaagtaggtggaggggtggaaaggtagttttttgtgtttgtggtagggattgtttgtttttttttttaggtatttttattttttggtgtttttttttgataagaagtattaattggtttggggatagtagtgttttttatttagggatttatttagtaatattgttttgtttgtggaaattattgtttttttattttttttttatttttatttttttgttttttgtgtagttagttttgggttaggggaaaggagtttttaggtttttagggggtaggttagtaatagataattgagtatgattatttttttttgggagtatataaaattgtaaaattagtaaagaatttggttatagtgtgtttatgtgtttatagagtttgtttgttttattaaagggaagtgttaggtttaaggtttttgttaatttgaaagagatattgagaaaatgagattttttggggatttagagggaaagtgtaagaattttttattgtatttttagggaattgtttaatggggagtttggttttaaaagattttggtaataaaaggttggataggaaatttttttaggtaaattttttgttggatttaaagagaatattttttttttgttataaatttttttttatataagtttagattttgttttttttgtttttttttttttttagtttttttaagtatttttgagtagaatatttgataatttttttgagtaatagggattttttggaagtattaattattttttatgttttttggaaataagattataattttttatgtgtatatgtgattttttttttttagttaggtttattttattgtgtaaatagtattaatatatggaagagttttttgtattgtgttataaaagatttttaataggattttatagagaaaagggttaaatagttgatataaaggatttttgtttttttagaaaagagggattttggattttttttttttttgaagttaagtatgagtttatataataggaataaaataaatttaaggtgtatattagtataatattagggatattagaatggatggtaaatttttttttttatataaatatgaaagtatttttataatttttttttttgaagtttttatttagaaaattatattaaatataggattttaaaatagtagtgattaaagatgaaagttaatttttttttttaatttttttgattagtttggtttaaatttatgttttaaaatttttagtaatttagatttttgtatatgtgtatttataagattttttttatattttgtaatttgtaggtatttagtatggttattgattttaagtgataaataggtagaagatttgttaggataattttagtttttattatgtgtattttttattttttttgttatttattagttttttgtagtaatataattgttagttatattatttggaaattaatgtgtttttgtagtgaattatttatttttagtaaatttattgtattattattttaaatattgaaatttgattttattagatgtttagaatgatagttatagagtagaattagattttaatttttatgtataatatgtaaataaattaaggtgtagaaagttattgttttaaagttatataattaatagtttagtggtttttttagtgttaattatagtaattttagatttaagattgtttgatttaggaatggagagaaataaaataaaatgaatgtttattgaaatatatattttagatattaagatagatttttttgtgaaatattttaagatgtggatttgtatttttatttttaaatttgagtaaattt

SEQ ID NO: 488 - DNA, 3000 bp, Artificial Sequence
  Description of Artificial Sequence: Synthetic polynucleotide
atatttaaattgtatatttggtttgtaatatattatatatttaaaagaattattatttttttgaatattattaatattaataatagtattatagtgattaagagtggatttaaataaaggttggtttgaaatttaggtttgttatttattagtaagtttttaaaaattttgagtttttagtttttttatatgtgaaatggagaaaataaatttgtaaaattaattaaatttgtttatttatatttttttttttagtgtatattaattggtattttttgttaggttagaatgtgtttttaattatgttttaaatttgttttgtgttaattttattgttagaattttttttattttgagaattagaaaaggaaatattatgtttggtaatgtttatattttttaaaataaatttgtaggaaagaatatttagtaagtgatgagagtagtaatgattgtttttattattttaaatttataatattattttttttagagttttttaagtattgtagataattttttatttattaaaaaataaattgtaattataagtatttagggttgatattgtttttgaattagatagtgtttatattagttgtataagattaatttaaagtagaggatgaaattttttttttgaattttttttagaatgtaatttagtgaatatattaaaattaaattttttttgaatgggagtaatttttatggattaatttgtaattttttagattatatttaaggtaatgtagaggttgttgtattataggttttgtgattagagattattggatttgtttttggaaaagttatttatgattttttgggttttggtttttttattttttatattggtttaataatgattattgtagagttgttatggaagttaaatgaatttatgtattataagtgattaatataatgattgatatttagtgatttattaataaattaaaatatttattattaatatgatagagaaggtgttgttaaaatagataataggtttttggaagaggtgattaaatggatgtaaaatttatggattgtttattttgtttatttttgttgtgttttttggttgtggtatatatatgtgtgggtataaaattgtaaattttatgtagttgtgtagtgtatgtgtagaaggtttagatatgaaatgttattttagtaatgtgtttagagaagttttgatgttgttttggaagtaagttgttgttgtttgatttttgggtgtttgggatggatgtttatatttgtatttagtagtattggaaggggtttaggttttttgtagtatagtttatttttagattgtttagttttttataatatatatttttatggaaaagggtatttttttttgttagaaaaagtgttttagtttggtttgggttggtttttattttatgttgttgtaagtaggtgaagttttttttgtttttttttttggggtaagtggaaaggagtttggtagggggtttgtagtggtttgtataggggaattgggtagtgagagagttttaggtaattttgggggttgttttatagaagtaggtggggattgatagtggttttttggtttagggaggagagtgtggttgtgggtttttttttttagtttggaggttgtagttgtttgagttggtttgggtgggggtggggtgggggtggtgtggagggtatggagattatggtggtgttatttgggatatttagggttttgaggttttgggtggtttttatgtgagattgtaaattatgataataggtagttatttgaggttaaataaaaatggagtgggttttttgtgtgttgttgttttttgtgtttttggtggttttttttgaggtttttggtggttttatgagtttgtagtagttggtggtgatgttgtttttgttttatttttttgtgtaagtgtgaggttgttggtagtgtggtgtatgttttggttgtttttggtttttgtgtaaaatttttattttgtttatgtgaagttgttgttgttttagagagggggaaagagttgtgggaaaagttggggagtgatgattgtggtggttgggtgtgtttttttattttttttttttttttttttttttttgttgtagtttggagttttggtttttttttttttttttttttttttggagttggtttttttttttgttttgttttttttttgtttgtgtatgttatttgttgtggggtggttgaaggggatgttttgtttttattagaggtatagtgtgaaggggaaattttgatattggaaggaatgagaataaatatttaattatggatgtattgaattgtggttgggatagatattttgggaatttgaggtggattgggtgatgaggtgagtgatttttttttttaatttttgttttagggtttttgggggagtttgagttgagagaatttttaaattttttgggaaagtgtgtgaggttttgttggggatgttgagtgttgggtattgaggatgtgtagttggatggtgtgtgggtgtttgtgtttttggggggtgtttggaggttgggtgttttatgtttgagggtttgggttgtttggattgtagtggtgttttttgttttagaagatgtttttaagttttaagggttttttttgagtttgtttgttttttttggggttggtgtggagtttgtgtgtaatggagtttatttagtagtttagtgtgtggtttttatttgtattttgtttttatttggtagaggtgtgagtattggggttttttttatattttttttatgatgtgtattattttttgatgattttttagatggtttaggtgtgaggatgttgatttagagttttttggagggttataggtgtttgggtttttttggtgttgggtgtgtgtgtattttaaaggtttgtgttttaatttttaggtattgattgggttttttaattgtggtgattttattttaatagtttttatgtggtgtggattgaatgtt

SEQ ID NO: 489 - DNA, 3000 bp, Artificial Sequence
  Description of Artificial Sequence: Synthetic polynucleotide
gatatttagtttatgttatataaaaattattaaagtgggattgttgtagttgaaaagtttgattagtgtttggagattagaatgtgagtttttaaagtatatatgtatttggtattgggaaagtttaggtgtttgtgattttttgaaggattttgggttagtatttttgtgtttggattatttagggggttattagaaagtaatatatgttataagaaagatgtgggggagattttgatgtttgtgtttttgttaggtggaggtggggtgtaggtagaagttgtgtgttggattgttggatgaattttgttatgtgtaggttttgtgttgattttggaagggataggtaggtttggaagggatttttggggtttggggatgttttttagggtagagagtattgttgtggtttgagtggtttgggtttttaggtgtggggtatttggtttttaagtgttttttggggatgtaggtgtttatgtattgtttagttgtgtgtttttagtatttagtgtttggtgtttttggtggagttttgtgtatttttttggaaagtttgggggtttttttaatttaggtttttttgggagttttggggtgggggttggaagaaggggttatttattttgttgtttggtttgttttgggtttttgaagtgtttgttttagttgtggtttagtgtgtttgtaattaagtatttatttttgttttttttagtgttgaagttttttttttgtgttgtgtttttggtgaaaataggatattttttttggttattttataataaatagtgtatataagtgggggagaagtggggtggagggagaagttggttttgagggggaggaggaaaggagaggagttaaaattttggattgtgataggggggaaaggagaagaaaagaaaatgagagagtgtgtttagttgttgtagttgttattttttggttttttttgtagttttttttttttttttaaggtagtgataattttatgtggataggatggaagttttgtgtggaagttgggaatggttggagtgtgtgttgtgttgttggtagttttgtatttgtgtagggaggtggggtgggggtgatgttgttattggttattgtgggtttgtgaggttgttgggggttttgggggaggttgttagggatgtggggggtggtggtgtgtgggggatttattttgtttttatttgattttgggtgattgtttattgttatggtttgtgattttgtgtggggattgtttagggttttggggttttggatgttttgggtggtgttgttgtaatttttgtgttttttgtgttgtttttattttgtttttatttgggttgatttgagtggttgtagtttttaggttgaggggagggatttgtgattgtgtttttttttttgggttggagagttattgttgatttttatttgtttttgtggggtagtttttggaattgtttggaatttttttgttatttagtttttttgtgtaggttattgtgggttttttgttggatttttttttatttattttaagggaggagatagaagggattttgtttatttgtaataatgtgaaataaaaattaatttagattagattggggtgttttttttgatgggaggaaatatttttttttgtggagatatatgttatgaaggattaagtggtttggggataggttgtgttgtgaagggtttgggttttttttagtgttgttgggtgtaggtataggtatttgttttagatgtttaaaggttaggtagtaatgatttatttttaaggtggtgttagagtttttttaggtatattgttgaaatgatattttgtgtttaagttttttgtgtatgtattatgtgattatataggatttatgattttatatttatatgtgtgtatgttataattaggggatatagtaaaggtagatggaataaataatttataaattttgtatttatttaattattttttttaaaaatttattgtttattttagtggtattttttttgttatattgataataaatgttttaatttattgataaattattgagtgttaattattgtattggttatttatggtatatgagtttatttaatttttatgataattttatggtggttattattaagttggtataaaagatgaggaaattaaagtttaaagaattatgagtgatttttttaaagataaatttagtggtttttaattataaagtttatgatataataatttttatattattttaggtgtggtttaagagattatagattaatttgtagaaattatttttatttaaagaaagtttagttttaatatatttattaagttatgttttgaaaaaggtttagaaaaaagattttattttttattttaggttggttttatgtaattgatatgagtattgtttaatttaaaagtagtattaattttgaatatttatggttataatttattttttaatgagtggggaattatttataatgtttaagaggttttagaaaaggtggtgttgtaaatttaaaatgataaaggtagttgttgttgtttttattatttattgggtgtttttttttgtagatttattttggagggtgtaggtattgttaggtataatgtttttttttttggtttttaaggtagaaagggttttggtagtggggttggtataaagtggatttggagtatggttgagagtatattttggtttaatgaggaatgttagttaatatatattggagagaaaaatatgaatggatagatttaattaattttgtagatttattttttttattttatatgtgagaaaattaagggtttagaatttttagaagtttgttaataaatggtagatttgagttttaagttagtttttatttaagtttatttttagttattgtgatgttattattagtattaatggtatttagaaaaatagtaatttttttaaatatgtaatatattataagttaaatatgtaatttaaatgt

SEQ ID NO: 490 - DNA, 2501 bp, Artificial Sequence
  Description of Artificial Sequence: Synthetic polynucleotide
gttatttttatgtgttttgtagttttttgaaggggtgtgggatttattgatgttaattatttagtattatttttagattttaagaagttggggtgtgagttagtaattagtatagaaaagagatattaaaataagtttgagttggggagtgtttttttaattttagttttttggaagagattttttttttttttttgagatagagttttgtttttattgtttaagttggagtgtagtggtatgattttggtttattgtaattttttttttttgggtttaagtgattttttttttttagttttttgagtagttgggattatagatatgtatttgtaatttttattaaaaatataaaaattagttgggtgtggtggtgtatgtttgtaattttagttattggggaggttgaggtaggagaattgtttgaaattaggaggtggagattgtattaagatagtttgttttagttaaataatttggtgttagtgtaggaaaaggtggaaggtatggggttagtataggagggtttaatatttttaattttattaagttatattttggtaatttttgttttttatgagaagtttttgttgggtttgttttagtgttgttttgaggttttttttatgagttttgatagggtagaggttgttttgagtgttttttttttttttggtttaagagtggtttaaaagaaggatttttgattggaattggttattttgtgttattttttgatttttgattttgttttaaagggggatgtgggggaggggttttggtaggggtggttttgttttttttaggtttgtaagtttaggtttttgtttattgggtttagtttattttgtggttgtttagggaggttgttggtatttgtgatttatgattttttttttgagttttattgaggttatagttgtggttttgtttttttatgtttgttttttgttttttgtttgtgatgggtgtttttgaggattaatgagtgtgttgtatttattttttgggtggggttaagtgttgattaattgttgtttgggtgtttggttgggtttaaatgttttaattgttagtggtggtggggtgggtagagggttggggatggtaggtttaattaatgggtgggtatgttgtttttgtgaggaggtgtgttttgtggttgggtgtgtggtgtttgtggtggtgtagggagggggagggaggtaaataagatggtggtggtgtgttgggtgtggaagggggaggtggtttggggtgtttgtgagtgaggtgtggggtggtgaagggagtgtgggtggtggtatttgttgttgtggttttggatgggttgggttttttttgttgttttgttttttttatatgtgtggtggttgtggtgagggggatgtgttgtttggggtttggtatttttgggaattttttggtttggagtttgtggtttgtgttgttttggttgttgggagttttgtggagtttttgttgttgtgttgttttgtggattggatgttgagggtatttggggtggggtgtgtgtttgggtagatgtttgtggggaggggggtgtttgttgggttttggtgattattttgggggttgtgggttggtttggggggtgtttagtgtgggtttttgtgggtgttgggtagtgattagttttgagtggagttgttggttgtggtgggaggttttttggatgtttttagttttttgaatgtttgtttgggttggtgggagttggtgttttttgggaggtttgtttggttgtttgtggtggagtgtttgtttttgggataggtggtgggattggggtgttgttggagatgtttttagtgaagttgggttttttaggtgtgggggttttggggggtagtgatgttgtggatttggtttgtgggatgggtggtttggagaagattgtgtttggttgtgtttatatttgtttgtgggtttgaggtttttggaggatgatttagtattgaaaagttttggttggtttttttagggtttttgaggatgaagttgattttgattgggttgttttttagttttgaggtttgggttttattggaatttgtgtttgagttgttgttttggatttttggtgtttgttggtttgtagattttgtattgggtttggatttgtagttgggattgatgtgtagaataattgtttttgttggaagaagggttttttttttttttttggggtttttgttgtttttttttttttttttttttttgtaaaattttggagaagggaagttggaatataaggaaggattgtttatttgtggatttagggttggtggtgggattttaggattttgggtttagtatggaggtggtggatttgtagtagttgggtatgtttatggagggtgagttgatgttggtgggtatggatatgtttatttattgtattgattttattgaggttatttattagttgtgttgtaagtgggttaagtttattggtaagtatttgatgggggatttgt

SEQ ID NO: 491 - DNA, 2501 bp, Artificial Sequence
  Description of Artificial Sequence: Synthetic polynucleotide
gtaggttttttattaggtatttgttgatgagtttggtttgtttgtggtgtggttggtagatgattttggtggagttgatgtggtggatgaatgtgtttatatttattgatattagtttgttttttgtgaatatgtttagttgttgtgggtttattatttttatgttggatttagggttttggagttttgttgttagttttgagtttgtgggtgagtggtttttttttgtgttttgattttttttttttaaaattttataaagaaaaaagaaaaaaaaaaggtaataaaaattttaaaaggaagggaaaaattttttttttaatagaaatgattgttttatatgttagttttggttgtgagtttaagtttggtgtagggtttgtggattggtgggtattgggggtttgggatggtggtttagatgtgagttttagtgggatttgggttttagaattgggagatggtttggttagggttaattttgtttttggggattttggggaggttggttggggttttttagtgttaggttattttttggggattttaggtttatggataagtatgaatatggttgagtgtagttttttttgggttgtttattttataggttgggtttgtgatgttgttattttttgggatttttatatttggagagtttaattttgttgggggtgtttttggtgatgttttggttttattgtttgttttaggagtaaatgttttgttgtggatgattgagtggattttttggggggtgttgatttttgttggtttgggtgagtgtttggggggttgggggtgtttgggaggttttttgttgtggttaatagttttgtttagggttggttgttgtttggtgtttgtgagggtttgtattgggtgttttttgagttggtttgtgatttttaaggtggttgttggggtttggtaggtgtttttttttttgtaaatgtttgtttgagtgtgtgttttgttttgagtgtttttagtgtttggtttgtggggtggtgtggtggtgggggttttatggggtttttggtggttgaggtggtgtaggttgtaggttttgggttggggggtttttgaaggtgttgggttttgggtggtgtgttttttttgttgtggttgttgtgtgtgtggaggaggtggagtggtgaggggggtttagtttatttaaggttgtggtagtaagtgttgttatttgtgttttttttgttgttttgtgttttatttgtgggtgttttgggttgttttttttttttgtgtttgatatgttgttgttattttgtttatttttttttttttttttgtgttgttgtggatattgtatgtttggttgtagggtatgtttttttgtgaggatgatgtgtttatttgttggttgaatttgttatttttggttttttgtttgttttgttgttgttgatgattggagtgtttggatttggttgggtgtttgagtggtgattggttggtgtttggttttgtttgaggggtggatatagtgtgtttattggtttttggagatgtttgttatgggtagggggtgggaagtaggtatggggagatgaggttatggttgtgattttggtggggtttgggaagggggttgtaggttatgggtgttaatggtttttttgaatggttgtagggtgggttgagtttggtgggtgggaatttgggtttgtggatttggaaggagtggggttatttttattagagttttttttttgtatttttttttggggtgaggttaagggttaaaaagtaatataaagtggttaattttagttaaaaattttttttttgagttatttttggattaggggaaagagaaatgtttagggtggtttttgttttattggaatttatgggggaagttttaggatagtgttgggataagtttagtgggggttttttgtgaaaaataagagttgttaaaatatggtttgataaggttgaaaatattgaatttttttgtgttagttttgtgttttttatttttttttgtattagtgttaggttgtttagttggaataaattattttggtataatttttgttttttggttttaagtgatttttttgttttagtttttttagtagttgagattataggtgtgtgttattatgtttggttaatttttgtatttttagtagaaattataggtgtatgtttgtaattttagttatttagaaggttgagggaggagaattgtttgaatttgggaggaggaggttgtggtgagttgagattgtgttattgtattttagtttgggtaataagagtgaaattttgttttaaaaaaaaaaaaaagattttttttagaaaattgaagttgaaggaatattttttaatttaaatttattttggtattttttttttgtattgattgttggtttatattttaattttttggaatttggagataatgttggataattggtattggtaggttttatgtttttttagagaattgtaggatatatggaagtgat

SEQ ID NO: 492 - DNA, 2501 bp, Artificial Sequence
  Description of Artificial Sequence: Synthetic polynucleotide
ggaggatagaaatataaattaaagaatgatataaataattataaagttatagttgttaaaagaaaagtatatggtgttaagagaatgtgtaatataagatttatttatggaggtgagggaaagtttgtttattaaagaagttatgatttaatttatgaagattaggagttggttgggtgaagaaaaaaaggttagaggaaggaagtttatattggggaaggttttaagtataaagggtaggaggattatagaggtatatttatgaaatttggagaaggtttttagtaagtaaggagaagttaaatgaaagtttatgggagagttggaggtttgaagatatgtttaaggatttggtttttattttttttttattttaagagtagtgggaagttattaaatgattttaattagagggttggtataattagttttgtattttgaaaagttgaatttagtttttgtttgagaaattgagtgaaagagtttagaatggttgtggttgagggtgatttgtgggagatttttatataagttatggtagtggtatgggttggtggtagaagagggaatagggagaagatttggaatttaatttttttttattgataaagttattttagttttggtaaggtaattaattggtgggaaagaagatgtttagtttttttgattttattgtattttttgtatttttaatatgagtattgggaagtggtaaaatatttagaggtagtttgggtgttaggtggagtatgagttaaaattttaggatgaagtaaatgaatatttagaatgataggaaagatttgggagttgggtttgggggagggttatttatttttattttttggagattttggtataaatttttgtttttgtaattttttttttaggtaaaggaatttattaaatgaattgttagaagatttattgattagagggttgtatagaattatatttttgagagtgggaagtaggttgattatatagtttattatttaattaggatatatttgaaagagaaagggggttttattaatatttaaattataaaatatgtatattaggaatgttttgggtaaatttggttgttttagtaagaaaggaaatttgaaagtttatattgttttgtttttatgttattttgtttgtatatgagagggtaagtattttttttttttatttgtattaagggaataaaagtataagtatttaggtgatttttaatttatttttaattttatagtttttgttatattttatatattttgaaaattatattttttattattattattttgtgataggtgattatttataattatttattgatttagttttgggaagaggtggtgtaaaatgggatgttttatttaggtgtttattagaaatgtagaatttttgtttgttttttagatttattgaattagaatttgtatttttaaataagatttttaggtgattaatatgtatattaaaatttgagaaaaatttttagattttgatttaaagaaaaatattttataatttgatagtgtatgtatatatatatatgtatatagatataattgaagtataaatttaatgaagtagaatttattgttattattttatttgggaaagaaatgtgtttgtgatttaatagattggagtatttatttttggattttaatttgtaatttgaaaatgtatttttaaagtatttaggagtaatttgaagaaagttgaggggaggtggtagatgttttgatttattagggaaaatgtggatgttttttgttgttattttgtgaattgtgtgtatttagttatttttgagtaaatatttggagtgaggaatttttgagtggtgtgggagggtggtgaggggtagttgaaagttggttaaagtttttggaggggttggtttaggaaatatgattggtagttatgagagagttaggggttggatgttgaggagagggagaaggtttttgggtggagagaggttttgtttagttgttggtgaggagttttttgttttttttgtagtgttgagttgaagttgagtgagttatttgtgtgtatggagtgatgatatttttgtgtgtgtatttgtttgggataggagttggatttttgtgtagttttttttggttgttgggggtttttttgtgttttgttggtttttaggtttttttttggttggtgagtgggtgttatatttggtttgtatatttgtgttgttggtttggtgtggggtttggagagggtgtggtgtggaggtgtagttaggggtttgggaaggtgttgtttgttgtgttgggggtttggtttatgatgagtagtggggtttgttatgggttgggggttgtttaggggtttgtggttgttgtatattgttttgtggatgtgtattgttagtatgattttattgtatgtttagaagttgggtgagtggtttttagtttgggtttggtggggtgttgggggtttttttggggtttttgtttttttgttgt

SEQ ID NO: 493 - DNA, 2501 bp, Artificial Sequence
  Description of Artificial Sequence: Synthetic polynucleotide
gtagtggagaggtggggattttaggaagatttttggtgttttgttgagtttgggttggggattatttatttgatttttgaatgtgtggtgggattgtgttggtgatatgtgtttataggatgatgtgtagtggttataggtttttgagtagtttttgatttatggtagattttgttgtttgttatagattgagtttttagtgtagtggatggtgtttttttggatttttggttgtgtttttgtgttgtgttttttttggattttgtgttgggttggtagtgtagatgtgtgggttagatgtggtgtttgtttgttagttaggagggggtttggaggttggtgaggtgtggggaggtttttggtggttgagggaagttgtataggagtttggtttttgttttgagtgggtgtatgtgtgggggtgttgttgttttgtgtgtgtgagtgatttatttaattttaatttagtgttgtgggggaaataggaaattttttgttaatagttgggtaggatttttttttgtttgagagttttttttttttttttgatgtttagtttttagtttttttgtagttgttaattatgttttttagattagtttttttgagagttttggttgatttttagttgttttttattgtttttttatattatttaggagttttttgttttaagtatttatttaagaatgattaagtgtatatagtttataaagtaataatagaaaatgtttatgttttttttagtagattagaatatttgttgtttttttttagttttttttagattgtttttaggtgttttagagatgtgtttttaaattgtaagttgagatttaggagtgaatattttaatttattgagttgtgagtatattttttttttaaataaaatagtaatggtaaattttattttattaaatttgtgttttagttgtgtttatatgtatgtatgtatgtgtatatattgttaagttgtaaaatgtttttttttaggttgaagtttagaggttttttttaagttttaatgtatatattgattatttggaaattttatttaaaaatgtagattttaatttagtaggtttaggaggtaggtagagattttgtatttttaatgagtatttggatagagtgttttattttgtattgtttttttttgggattgagttagtgagtaattgtaaatgattatttattatgaagtgatagtggtgggaaatgtaatttttagaatgtatagagtatagtagaaattgtaaaattaaaagtgggttgggagttatttgaatgtttgtgtttttatttttttaatgtaggtgaagaaagagaatatttatttttttatgtgtaaatggggtaatatgggagtagaatagtataaatttttaaatttttttttttgttagggtaattagatttgtttaagatatttttggtgtatatgttttgtagtttaaatattaatagaatttttttttttttttagatatgttttgattggataataaattatgtgattaatttattttttatttttaaagatatgattttgtatagttttttggttagtagattttttagtaatttatttaatgaatttttttatttgagaggaagattgtagaggtaagggtttgtgttagggtttttagggaataaaggtaaatagtttttttttaaatttaatttttaaattttttttgttattttaagtgtttatttgttttattttggaattttaatttatgttttatttagtatttaagttgtttttggatgttttgttattttttagtatttatgttgaagatgtagaaagtgtagtgaaattaggagggttaggtatttttttttttattaattaattgttttgttaaagttggagtgattttgttaatggaggaagattgagttttaaattttttttttatttttttttttgttattagtttatgttattgttatggtttgtgtaggagttttttatgagttatttttagttatggttgttttgggtttttttatttagttttttaaatgagagttgaatttagttttttaaaatataaaattagttatattaattttttgattaaaattatttaatggttttttattgtttttgagataaagagaagataaaaattagatttttgaatgtgtttttaagtttttaatttttttgtaaatttttatttggtttttttttgtttattgaaagttttttttaaattttgtgaatatgtttttgtaatttttttattttttatgtttagagttttttttagtgtggattttttttttttgatttttttttttttatttagttaatttttggtttttgtggattgaattataatttttttgatgggtaagtttttttttatttttatgagtagattttgtattatatgtttttttggtattatatgttttttttttaatagttgtaattttataattatttgtgttattttttaatttatatttttatttttt

SEQ ID NO: 494 - DNA, 1508 bp, Artificial Sequence
  Description of Artificial Sequence: Synthetic polynucleotide
attttataattataaatatttagtgtattttgtaaatatggtataatttgttggtataaaattttattgttttagaaaatattggtaataaaattatagaaaagttaaagatttttattttttattttgaagtgtttgggagatattttagaaatggatgggaaatgttaaattttgtatgtttgtttatttttttttttatattgattagatgtaaatgagtgttattaaaagtatattataggtatttatatagattttttttataagggatttataaagtttagatgtgaaatgtattttaaagggtttttagttgttttttatttttttttttgtgaaatagggaagatatatgtgtttttaagggtagagatggaatttgggttaatgggttggggggtggggggaagttggaagggattgttttaggatatggtaggatagtggattgtttttgttgttttgttgtttatattggggttttttgtaggtgtgttggttttttttttttttgttgagaagaagttttgttaaaatatttgttttttttgggaatttttttgtgggtttaaagtgggaaaatgttgttttaggtttaaaataatttgtttaagttttttagtgtgggagaaatgtttttatttgttttttgtttttgggggtgttttttgttttttgttgttagaattttggggagtgtttagatttggggtagtatatgtttgggttaattgtgagtagaataaatttttggtgggtggttaggaagtttttttttagttattgtttttttttagtgtttttttttttttttatataatataagattttttttttttagtttttttaaagtatagtttaaggaaatttttttatagtttttatttagttatgggttagtatgtttgggggtaaatatgtagatttggaggtaggtatttgtgggggggtgttggtttgggtgtgtggggaagtgtttgtttttgttatttgtttttttaaatattttgattgttgatttggttttttagttttttttttattttggagtatttttttggtgttggtattgttgaagaatgggtttgggtggggaggtgaagagaagttaggaatgttttatgtttttttaatggagagggggttttgggagtttttgagttaggaggatatggaaaaggggattggggttttgagattgggtttgttgggtttaagatgtgttttttggatgggtttaggatgtttttttgttgtgggaattttgtggtttggttttgtttgttgggggtttgaaaaagtggattgtagggtggaaggtgttatttatttgagttttggggatagtttttgggattttttgttaagtgtttaaaatggtaggtttttaagtggtgtgtggtgtttttgtattttttaaaatttttgaaatattttaaaaatttttttgtattttggtgtttggtagggttttttaaaaaaagtaaattttttttttaaatgta

SEQ ID NO: 495 - DNA, 1508 bp, Artificial Sequence
  Description of Artificial Sequence: Synthetic polynucleotide
tgtatttgggagggaggtttattttttttggaaaattttgttagatgttaagatgtagaaggatttttgagatgttttaagaattttggaaagtgtaaaaatattgtgtgttgtttggggatttgttgttttgggtgtttggtggagagttttggggattgtttttaggatttgggtaaataatattttttattttgtaatttatttttttgaatttttagtaggtagggttggattgtggggtttttgtgataggggagtattttagatttatttagaaaatgtgttttgggtttaatagatttaattttaggattttaatttttttttttgtgtttttttagtttaggggtttttgaggttttttttttattaggaaaatataaaatatttttggtttttttttatttttttgtttaggtttattttttagtggtgttaatgttagaggagtgttttgaagtggaaagagggttggggggttagattagtagttgggatatttggagaggtagatagtagaagtggatatttttttgtatgtttgagttggtgtttttttatggatgtttatttttgagtttatgtatttgtttttagatatgttggtttgtggttggatgaaaattgtgaggaggtttttttgggttgtgttttaagggaattgaggaaggaagattttgtattgtatggggggaaaaaaaggtattggaggggggtggtggttgggagggagttttttggttgtttattaaaggtttgttttgtttgtggttggtttggatgtgtgttgttttgggtttaggtattttttaaggttttggtagtagagggtggggagtatttttgggggtagagagtgagtaagaatgttttttttgtgttggggggtttggatagattattttaaatttgaggtaatatttttttgttttgaatttatgggggggtttttgggggaggtggatgttttggtagggtttttttttagtagggggggagggagttgatgtgtttgtagagagttttggtatgggtaataaggtggtagaaataatttattattttgttatgttttaaggtagttttttttaatttttttttattttttggtttattggtttaagttttatttttgtttttgaaaatatatgtgttttttttgttttatagagggagggatgagagatggttaggaattttttagggtatattttatatttaaattttgtggattttttatggaaggaatttgtgtgggtgtttgtggtgtatttttggtgatatttgtttatatttagttggtgtggaaagaaaaataagtaggtatgtagaatttaatattttttatttgtttttgaaatgttttttaaatgttttgaaataagaaatgaagatttttaatttttttataattttattattgatattttttggaataatggaattttatgttaataggttatgttatatttgtaaaatatattaaatgtttataattgtagaat

SEQ ID NO: 496 - DNA, 286 bp, Artificial Sequence
  Description of Artificial Sequence: Synthetic polynucleotide
tttgtattaggttggaagtggttgttagttttttgtgtaattttattttttggaaaagtggaattagttggtattgtttagtgtgatttgtgaggttgagttttaatagtttaaagaagtaaatgggatgttatttttgtggggtttgttttttgtgaggtgtttattttgtatttgttatgtaaaatgagggagtgttaggaaggaatttgttttgtaaagttattggttttggttattagtttttatttaatgtttttgtgatgttgttgttgatttatttggg

SEQ ID NO: 497 - DNA, 286 bp, Artificial Sequence
  Description of Artificial Sequence: Synthetic polynucleotide
tttaaatagattagtagtagtattatgaaagtattgggtagaggttgatgattaggattaatggttttataagatggatttttttttaatgtttttttgttttgtatggtagatatggggtgagtattttgtgaggagtgagttttgtggaggtggtattttatttgtttttttggattgttggggtttagttttataaattatgttgggtaatgttagttgattttatttttttagagaatggaattgtatgggggattggtggttatttttagtttagtgtaaa

SEQ ID NO: 498 - DNA, 2501 bp, Artificial Sequence
  Description of Artificial Sequence: Synthetic polynucleotide
tttatatatattatgttttttaaatgatatattagttttttgagggtaatttatattggtaatagtttttagatgtggaaattgtgaagataatgttggtgatgtggaagtaatataaattttggagttttttagatttaggtttgaatgttagattgttttttatttagagtaattttagagtattattttttattttaatttttttttaggtttttttgtgtttatgtgttttttttatttttgtttattgtttatttagtgatttttgtatttttttttattgttagtgtgtagatatatagtttttttggttttgagatttatgttaattttattttattattttgttagtttatttaatttttattgagtaatgttagttgaaagttgtggtgggattaaatgttgtaatgagtatttaaatgaggttgaagtatttatgtattttatttatatatggtgaggtatatttaaggaaggttgtagttattaaaattttaggaaataattttttatttttttaggtgaaagggtttttaggtttttgtgttttggaaggtttatttatagttattttttaaatgataatgtgattgatgagtttagagtttagtttaaatagtaatggattggaagattagtttaggttttattaatgtggaatatagaataaattatgtttttgttttagtttgtttatttgtgaaatagagtttattatatttagttttttttgtttttaggtttgagttattttttttggttaaggtaagtaaatgtttatgatgtttggttgtgtataagataaagttataataaagttataatttattttttttttgtagaagattgtaaaaagtaaaagagatttaggtaaaaattttggaatgatttttggaatagagagtttttttagaattagaagttaaaggaatttaaaatatagggaggtttagggtttttattgatataaaggaaagatgttttttttataggtttatgtttatattttttttttttttttatttttatttgtatttttatttttatatagggtttatgggattttttttataaaagagtagttgtagtaatttatattattttttatgtttggttgtttattaagaggtgaaaagtagttttatataggttttatttttggatagttttagttgtaaagtttaaaatatgtgaaggtaatttggaaaagtaagtggttgtatataaagtaaatgtttatagagttttggataaaattgagtgtttatgtgtatatggtaagtgtttttagtgtttgtgtgtttatttgtttgtttgggtgattttgtttttgagagtttggatgagaaatgtatggttaaaggtaattttagataggaagaaaggtagagaagagggtagaaatgatttttgatttttggggttgagggtttttagagtaaatggtataatgttatgaggtttgatttatttttatgatggaatttaaggttttagtaagtatttgttggtttggttatggtttgttttttagtttgtaggagatttttttatttttttatttgtgtgtttttattagttttgaaaagaatttttggtagttaggagtaggtatttttattgtttttttttttttttttttgtttttattttgttggttttttagattgggttttggaattaaatttggtgagtgttggtttttaggaaatttggagttttggtgtttaaattttggtttaggaaagtaggagttatttaggaagtaggggttttttagggttagagttagttttttttgtttttgtttatgttgtgttagtatttgtttttttaaagttattaggtaggtgttagtgtgtggtgaggggaggggagaaaaggaaaggggaggggagggaaaaggaggtgggaaggtaaggaggttggtttggtgggggtgggatttgatttgtaaattgttgtatttgttttttattttttagtgttttttttgagattttggggagttagtttgttgggagagtgggatggtttggagtaagtttagaggtagaggaggtgatagagggaaaaagggttgagttagttgttttagtgttgtataggagttgaagggatgtattatgttagttttagtttggttttagtgatagttaatgttttttgtagtgtggtggttttgaagttgttgtttggagttgtttttttttttttggtgaagtttttaaaagttgttaaagatttggaggaagtaaggaaagtgtttggtaggattgatggttgtttttgttttttttttttttattttgtttttttttattttgtttttttttttttttttgtttttttttttgtagttgttttagttggttatttttagttaattttttttattatttttttttttatttgtttttttgtttttgttggtttagtgttgttagtttgagtttgtagagaggtaattttttttggttgtgagtgggtgagtt

SEQ ID NO: 499 - DNA, 2501 bp, Artificial Sequence
  Description of Artificial Sequence: Synthetic polynucleotide
agtttgtttgtttgtagttaaagggagttatttttttgtaaatttgggttggtagtgttgggttgatgggggtgggggggtgggtggggagaagggtggtgaggggggttggttgagagtagttgattgaggtagttgtgggagagaagatgggggagggggggaaggtagggtggggggaggtggggtggagaggaggaggataaaggtagttgttagttttattaggtattttttttgttttttttgagtttttagtagtttttaaaaattttattgaagaggaaagggtagttttgggtggtggttttgaagttgttgtgttgtaagaggtgttggttgttgttggagttgggttggggttggtgtggtgtgtttttttggtttttgtatagtattggagtggttagtttggttttttttttttttgttgttttttttgtttttgggtttgttttggattgttttgtttttttagtaagttggttttttgggattttggagggggtgttgggaggtggagagtaaatgtaatagtttgtgagttgggttttgtttttattgggttggtttttttgtttttttattttttttttttttttttttttttttttttttttttttttttttattgtgtgttaatgtttgtttagtggttttggagaaataagtgttggtgtagtgtgggtgagggtaggagaggttagttttagttttggaggatttttgttttttgaatagtttttgtttttttaaattaaggtttaggtgttagggttttagattttttggaggttagtatttattaaatttggttttaaagtttaatttaaaaaattaatagggtggaggtgagggagggaggaaaaggatgataggaatatttgtttttggttgttaggggttttttttaggattgataagagtgtgtagatgggagagtgggagagttttttataaattgaggagtaagttatgattaagttagtagatatttgttgaaattttagattttgttatagggatagattgggttttgtggtattgtgttatttgttttaggaatttttagttttaagaattagaggttatttttatttttttttttgtttttttttttgtttggaattgtttttaattatgtattttttatttagatttttaaaggtaaaattatttagataagtaggtaaatatataaatattaaaaatatttgttatgtatatataggtgtttaattttgtttagagttttgtaaatgtttgttttgtatgtagttgtttgtttttttaagttgtttttgtatattttaaattttataattggaattatttaaggatagaatttatatagggttgttttttgttttttgatggatagttaggtgtagaggatgatgtgggttattgtaattgtttttttgtggaggaggttttataagttttgtgtaaaggtggagatgtaagtgggaatggaaagagagagaaaatgtaaatgtaaatttataaggaaaatattttttttttatgttagtagagattttgggtttttttatgttttaaatttttttgatttttgattttggggaggttttttgttttaaaagttattttgagatttttgtttgggttttttttgttttttgtagttttttatagagaaaagatgggttgtagttttgttgtagttttattttgtgtatagttaaatattataggtatttatttattttgattaaagaaggtaatttaaatttaaaggtaaggaagattggatatgataggttttattttatagatgaataggttgaaataaggatataatttgttttatgttttatattagtaaaatttaaattagttttttagtttattgttatttgagttagattttagatttattaattgtattgttatttgggaaatggttataaatgaattttttagaatataaaggtttgaagatttttttatttgaggaggtgaaaaattattttttgagattttaatggttatagttttttttgaatatattttattatatgtaagtagaatgtgtagatattttaattttatttgaatatttattgtaatatttaattttattataatttttaattagtattgtttaataggaattgagtgggttggtaggatggtagaatggaattaatataggttttagagttaggagaattatgtgtttatatattaatagtgaaggaaggtgtaaaaattattgaatgaataatggataggagtgaagaggatatatagatataaagaggtttgaaaaaaaattaaggtgagaaataatgttttgaagttattttgaataaaaagtagtttgatatttaaatttgggtttgaaagattttaaagtttatgttgtttttatattattaatattgtttttatagtttttatatttgaaaattgttgttaatataagttatttttagaaggttagtgtgttatttaaaagatataatgtgtataga

SEQ ID NO: 500 - DNA, 2448 bp, Artificial Sequence
  Description of Artificial Sequence: Synthetic polynucleotide
ttgttttgtttttatgataaaagttaatgggtttttagtatttttattaaaaaatagttatgtagatagtgttttggtggttttgttttgtattttaattttggggtgggggaaaggggttaatgtttttgtagttttaaattgggttattatttgtttattgagttgaatatgatgtggttttgtttggtgtgtttttgttggttttgtgtttgtgttattttagtagggtttgtagtaggtgaaaggtgaggttaatggatagagaagggttgttttgttgtggttgtttgtttgttgttttgagttttaattggttgggttttgtgtgggtgagaagtgtttgttagtagtaagaggagtgtgtgggttttgtattttggttttgtgttttggggttttagtgtagatttgggttttggatttggttgttttggggtttttttggttgtttttagggtatagttgtattaggagtagtagtgtggttagtagtgttgtgttttgtttgttttatggtgttgttggttttggatatataggggtagtgtagggtgaggtgtgtttgggatagttgtaggtgttgtttttttttttgtgtttgtttggtgatttttttggttgttgtttaatgtttgtagtttgttttttagttttagttattgtgttagtgttgttttattttttttatttagtttttttttttggaggagtgtggtggttgagttgagtggagttttggtgtagggggaggttgggtggatgttttgagttatttataggttgttggtgagtgtttgtatggtttaagattgagttttagtttttgttttttggggtaggttgaagatgttttggggaatatagggtttgttttggtgtgttgttagttttatatagtgttaggatagttttgattgatgttagtgaagaatatgtattgattgtagaagtaatgatagttatagttttgagtttgatggttggtgggttttggagggtgtatttttttatattagtttttgtgtttttgggtgtagtgttggaagtagtattggatgtaggaaagtgagaagttggttggggtgtaaagattgttttgggatttatgggagttttattgttttgtttagaatagttagtaatgattagggttgtttttagattagattagtttgggttgtgtgttttgatatatgaaagggaggtgggattgtgaggttgtttatggtgttgattttgttttttgtttttagaagtggttagaaatgtgagaatgttgtgttgttggaatttattgtttttttgtagttattagttttgtaaatgtaggtattaggagtttattgttggtatttagttaatatagtgggatttattgagaggtagtttgttataattaaagttttttagtatttttatttttttttagttttaggatttaaatttgtagggttgtttgataggtattatgtaatagagggtttttagtatttgagtgtttttagattataaatggttggtttatttgtttttgagtttgttaaagtagtttagtaaagtttagttttttttttgggaattatagtagtagtgtaattttgtttatgagtagtaaagaaatatgggtttaagtttttgttaatttttggtgtggataggttattttttttttattaattttagggtttttatttgtaagattgggtttggttaggtgtggtggtttatgtttgtaattttaatattttgggaggttgaggtaggtggattatgaggttagtagtttgaaattagtttggttaatatggtgaaattttatttttattaaaaatataaaaattagttgggtgtggtggtatgtgtttgtggttttagttatttaggaggttgaggtaggagaattgtttgaatttaggaggtggaagttgtagtgaggtaagattgtgttattgtattttagtttgggagatagagtaagattttgttttaaaaaaaaaaaaaaaaaaaaaaaaaaaaattgggtttggtggttttttggtttttttttagttttagaaatgattttttaatagttttttgtttaaaaatttatttattattattgtagattttggattatatatttaataatatatttattgaggtattatataaagggttttgggagtttttaaagagttggagttataagaagtttaggtagggttagagtaataaatgtgtttatgaagagtggggatgagtggtatttgttgggatatgggtgtaaagttgataaggttatgaaggtttaatagatatttatggagtgtttagtatgtggtgggaataagattattattaagggttttaaagtagttagtgtatattttagagtgaagaggggtattgtagggtgttagtttttttaagttttgattggtaatttaattttgtggaaattgg

SEQ ID NO: 501 - DNA, 2448 bp, Artificial Sequence
  Description of Artificial Sequence: Synthetic polynucleotide
ttagtttttatggggttgggttgttggttagagtttaagaggattagtattttgtaatgtttttttttattttaaaatgtatattgattgttttagagtttttgataatagttttatttttattatatattaggtattttataaatatttgttgaatttttatgattttattaattttatatttatattttagtaaatgttatttatttttattttttatagatatatttgttattttaattttgtttaggttttttgtagttttagttttttagagatttttggaattttttatatggtgttttagtaaatatgttattaaatatgtaatttggaatttgtagtggtaatgagtaagtttttaagtagaaaattattggggagttatttttagagttggaaagaagttaagagattattaagtttaatttttttttttttttttttttttttttttgagatagggttttgttttgttttttaggttggagtgtagtggtgtgattttgttttattgtagtttttgttttttgggtttaagtagtttttttgttttagttttttgagtagttgggattataggtgtatattgttatgtttggttaatttttgtatttttagtagagatggggttttgttatattggttaggttggttttaaattattgattttgtgatttgtttgttttggttttttaaagtgttgggattataggtgtgagttattgtgtttggttaagtttagttttataaatgaggattttgaggttggtaggagggaggtgatttgtttatattaggagttagtagaaatttgaatttatatttttttgttgtttatgggtagagttatattgttgttatgatttttaggagagaaattgaattttgttaaattattttggtaaatttaaaagtagatgggttagttatttgtggtttgaaagtatttggatgttagagattttttgttatatggtgtttgttagatagttttataaatttggattttggggttggaaaaagataagaatgttgggagattttggttgtggtagattgttttttagtgggttttattgtgttggttgagtgttagtggtggatttttgatgtttgtatttgtagaattgatagttgtagggaggtagtgggttttagtggtatagtgtttttatatttttggttatttttagaggtagaggatggggttagtattatggatagttttatggttttgttttttttttgtgtgttagaatatgtgatttggattagtttggtttggggatggttttagttattgttggttgttttaagtggggtgatgggatttttgtgggttttagagtagtttttatgttttagttggttttttgtttttttgtgtttagtgttgtttttagtgttatgtttaggggtatgaaggttggtgtagggaggtgtgttttttggggtttgttagttgttagatttgaagttgtggttgttattgtttttataattagtgtatgttttttgttgatgttagttggagttgttttggtattatataaggttggtgatatgttgggatagattttgtgttttttaaggtgtttttagtttgttttgagggatagagattggagtttaattttggattgtatagatgtttgttgataatttgtgagtggtttagagtgtttgtttagtttttttttgtattaggattttgtttagtttagttattatgtttttttggggagggaggttgggtggaagggatggaatagtattggtgtagtggttggggttggagggtaggttgtgggtattgggtggtggttggaggggttgttgggtgagtgtggggaggggagtggtgtttgtagttgttttaggtgtattttattttgtgttgtttttgtgtgtttagggttggtggtattatgaggtaggtgggatgtagtgttgttggttgtgttgttgtttttggtatagttgtgttttgggagtagttagaggagttttgaggtggttgggtttaggatttgagtttgtgttggagttttggggtatggaattagggtgtggggtttgtgtgttttttttgttgttggtggatgttttttgtttgtgtggggtttggttgattgggatttgggatggtaggtgagtggttgtggtgggataatttttttttgtttattgattttattttttatttgttgtggattttgttggagtggtgtggatgtagagttagtgggagtgtgttgagtagaattgtattatatttgatttggtgggtaagtgatggtttggtttggggttgtgaaaatgttgattttttttttttattttagagttgggatgtggggtagagttattagggtattgtttgtgtgattattttttaataaaagtattgaagatttgttggtttttgttgtagaggtagggtag

SEQ ID NO: 502 - DNA, 2344 bp, Artificial Sequence
  Description of Artificial Sequence: Synthetic polynucleotide
gtttggtatatttaagatttttatggaggtttagttttatatttttttttatttttttaggttggtttttttttgttgttgatgtgtgggagtttagagagtggttttttgtttttgtgggatttttggagaggtttggagagttggtttttgaaatgtgtttttttttttttttttttttttttttttttttttttgtttttttggttttattattattattgttattatgtttttttttattattttttttattttatattattattattattattattattattattttgttggttggttttaggttttgatgttttgggttttttttggggtggggtgggttgttttaggggggtttattgttatttatgaaggggtggagtttgtttgtttgtgggtttttataagggtggttggttggttggttggttgtttgggtaggttttttggttgtatttgttgtagtgtatagtttggttgaggtgtatgggagtttgttggtttttttttgtttgtgtttgtttgtgaaattgtggttggggtttattgtgatggtttttttgatatttttggatagtattttttttgtggaagtttggggatgaggatggtgatggagatttgtttggattttgagttaaagtgaggttttgtgagtttgttttgagtggaatttgtatttgggtattgttattagagaatggttggtttaggttattggtattttggagtttagggtttagatttggttttagaatgagaggttatgttagttgaggtagtattggtgggaattttggttttggtttgggagatgtggtttgttagaaggttggtgaaagtggattgttgttattggattttagattgttttgtttttttgagtttttgagaaggattgttttttaggtattgttgtttgggaggagttggttagagagatgggttttttggagtttaggatttagatttggttttagaattgaagggttaggttttgggatagggtggtagggtgtttgtgtaggtaggtggtttgtgtagtgtggtttttggtgggggttattttgtttttttgtgggttgtttttgtttatattggtgtgtggggaatggggttttttgtattttatgtgttttgtgtgtttggggtttttttatagggggtttttgtgagttaggtagtgagggttgtttttgtgttgtagtttagttaggttgtgttggtagaggggattttttaatttgttttggtgtgtggggattttgtttatgttgttttggtttttttggatggggtgtttttttatttttaggttttttggtggtttttgtatttggggtaaaagttgggaggattgggatttgtagtgtgatggtttgttgggtttttgtgtggtggtatagtttgggtttgtttaagtggggttgtagggttaaggggtgtttgtgttatttatgttttaggggagtttgtggtggggttggggttggggtttttaggttgttggggtggtgtgggaattttaagttggggtagttttatttttttagtttgtgtttttggatgtttttgtgtggtaggggtagatgtaaggtattttggtgtttttttaggtgttttaggagttggtgttttggtttgtatttttttgtggtttgttgttggatgagtttttggtgagtttggagtttttgtagtaggtgtaattttttttagaaatggaggttttgggggagttggaggttttggaagaggttgttttgttggaagtattttttagtgaggaagaatattgggttttgttggaggagttttaggatgtggggttgggatggggttgggtggtttggggtagggtggtggttttttttttgtggggaatgtttggttggttatggaggggtgtgtttttgttttgttttttttattgggttgattggtttgggatttttgttttttaggtttaggtttggtgagagattttatatagtggagaattgttatttttttttgggtattttggggattttagagttggtttaggtattagtaggtgggttgtttattgtgtatgtgtgggtttgtgggtagttgtttgggttgtgggagtagtttgggtagagtttttttgtttttttattagtttattttgttgtttgattgttttttttttatttttattttttgtttttggaaaatgtgttgttttttgggttgggtggagatttttgttttgtgaaatattgggttttgtgtagtgtttgggtttgatattgttttggtggtttgttttttttgtgtttttgtgttattgttgtttgtttgtttgggtttttgt

SEQ ID NO: 503 - DNA, 2344 bp, Artificial Sequence
  Description of Artificial Sequence: Synthetic polynucleotide
gtaggggtttgggtgggtgggtgatggtggtgtgggggtgtagaggaggtgagttgttggagtggtgttaggtttggatgttgtgtggggtttggtgttttgtgggatgggggtttttatttagtttaggggatgatgtgttttttgggggtggggggtgggggtggggagggggtggttaggtggtggggtgggttggtggagaggtaggagagttttgtttgggttgtttttatagtttaggtggttgtttgtaaatttgtgtgtgtgtagtaggtggtttatttgttggtatttgggttggttttgggatttttgggatgtttaggaaagaatggtagttttttgttgtgtggagttttttattgggtttaggtttagaaggtaggaattttaggttggttagtttggtggagggggtggggtggagatatgtttttttgtagttagttaggtgttttttgtgaaagagaggttattgttttgttttgaattatttgattttgttttaattttgtgttttaaagtttttttagtagagtttggtatttttttttgttgaggggtgtttttagtgaggtggttttttttgaggtttttagtttttttggggtttttgtttttaggagaggttgtgtttgttgtagaaattttgggtttgttaggagtttatttagtagtaggttgtaggggagtgtagattagggtgttggtttttggagtgtttgggagggtgttgggatgttttgtatttgtttttgttgtgtggaggtgtttgggggtgtgggttggggaggtggagttgttttggtttggggtttttatgttgttttggtgatttggggattttggttttagttttattatggatttttttgggatgtgggtggtgtaagtattttttggttttgtggttttgtttgagtgggtttaggttgtgttattgtgtaggggtttggtaggttgttgtgttgtgggttttggtttttttggtttttgttttgggtgtggaggttattgaggagtttgagggtgggagagtgttttgtttggaggagttggggtggtgtaggtgaaatttttgtgtgttggggtaggttgggagattttttttgttggtgtggtttggttgggttgtagtgtgggggtggtttttgttgtttggtttatgaaagttttttgtgggagagttttaggtgtgtagggtatgtggggtgtgggaagttttgttttttatgtgttggtgtgggtgaaggtgatttatgagggagtagggtgatttttgttgggggttgtgttgtataggttgtttgtttgtgtgggtgttttgttattttgttttggggtttggttttttgattttgaaattagatttgaattttggattttgggaggtttgtttttttggttagttttttttgggtggtgatgtttggaaagtgattttttttaaaggtttggaggagtagggtggtttgggatttggtgatggtggtttgtttttgttggttttttggtgggttgtgttttttgggttagggttgagatttttgttggtgttgttttagttggtgtgattttttattttgaaattaaatttggattttgggttttggaatgttgatggtttgggttagttgttttttggtggtgatgtttgggtatgggttttgtttaaagtaggtttgtagggttttgttttggtttggggtttaaatgagtttttgttgttgtttttgtttttgggtttttgtggggagggtgttgtttgaaggtgttgggagggttattgtggtgagttttggttgtaattttatggatggatgtgggtagagagaggttggtgggtttttgtgtattttagttggattgtgtattgtggtaggtgtagttaggaggtttgtttggatagttagttagttagttagttgtttttgtaaaggtttatgggtaggtaggttttatttttttatgaatggtggtgagtttttttgggatagtttgttttattttggaagggatttagggtgttgaggtttggggttggttggtggggtggtggtggtggtggtggtggtggtggtgtggggtggggggggtggtgggggagggtgtggtggtggtggtggtggtggggttggagagatgaagaggaagggggagaggggggaggggggaggggggtgtgttttgggggttggttttttggatttttttagggattttgtgggaatgggaagttgttttttgggtttttatgtgttggtagtagggagaaattagtttgggagggtggaggggagtgtggaattgaatttttgtgggagttttgagtgtgttaggt

SEQ ID NO: 504 - DNA, 2350 bp, Artificial Sequence
  Description of Artificial Sequence: Synthetic polynucleotide
tagatgtattggtgagattaggttttggttgtgattttgggtttgtattatgatttttgatttttgatttagattataattatgatttggttgtaattttttgatttggattttagttttttagtttttagagtttgtgatttttgattttgatttggattataatttttgattttgaatgtgatttttgagatttaatttgatagtaatatttgattttaattattatttttgatgatagtttttgtttatattttgatagtaattgtgatttttatgattttggttttgaatgtgatttataatttttgaatttgattgtgatatttgattttaattataattattaattatagtattgattataattttgattgtgtgatttttggttttattttttttatagtttttgtttttttttagaattttttttttggaatttggttgggtttataatttttgattttggtttttgatttgaggtagaattttggattttgattataatttttgattttaattggatttagattttagttattaattttgatttatggtttagttgaattttatttaatgattttagtttataatatttgattggttttttgttttagttgatttttgatttttgtttgattttttttttgattttaaaattttggtataggtagtttttagaaatttagatttataggatttgtaattatggtttttggaatttgagaattttggttagttttatttatttttgttatagagtttttttttagtttttaatttatgagattttttattattttttttagatattttattttaaggggattggttgggtgtgttttgagattggattttttttgaatatttttattttttatagatgtggatgaatgtagtttgggtgtttttttttgtggtttttatggttattgtattaatattgaaggttttttttgttgtagttgtgtgttaggttattgggtgttgttgggttggtttgggttttgtgtaggtgagtagtatagggatttgttagagagtttgggagtagggtttgggttttagggtaaagttggttggaaaggtggaggtgggattaaggtgttgtgggaggagtttagaaatttggtattggtgggggtggggttattgtgatgtgggtggagtttgtttgggaggttgggttttgtgattttgtttaattttttgtgtattttagatgtgaatgagtgtttggagggtgatttttgttttttttatggtgagtgttttaatattgatggtttttttgtttgtatttgtgtttttggttattgatttggattttgtggagttttttgttttggtttgtatttgggttgattttggttttggaaagggtgggtttagggtaggaaaaggtgggatggggagaagagggtgaaaaggggaaaatgagtttttagttggggtattttagtaggattagggggtagttggtgggagttttgaggtagtgagggggggtggggtgtggagatgaaagggttgagtttgggtatttggattgtgattgtaaagaagttgttttaaatttgttggggggtggtgtttgtagggagggaagtagtgtgaggtaggttggggaaggtgtgagaggtttaggagagttgaggggtggtggaggggtgtggtttagaatgttaggtggagtgggaggtgggttgggtttttggatgttttgttttgtagatgttgatgagtgtagtgaggaggatttttgttagagtggtatttgtattaatattgatggtttttttgagtgtatttgttttttgggatattgtgttggtttggattttgttttttgttttggtgagaggttttgttttggtttgattttttttttttttgattttttgatttgttgattggttttttatttttgtttttttttttttgttttttttttttttttattttttttttttgtttttttttttagtttttttaatttttttttattttaatttttttttgtttttttttttgtttttttggttttttttttttgattttttttttttttttttgtattttttattttgtttttttgttttttatatttgattatttgatttttttttttagatgtggatgaatgttgtgagtgaggtttagttttgtgtgggttgtagtgttgtgagaatttttttggtttttattgttgtgtttgggattgtgattttgggtattatgtgggttttgagggtatttgtgatggtgagtttgtttttatttgtttttgttagtgtttgtaatgtggtgttggaggttgtttttttggggattgaggaggggtgttttg

SEQ ID NO: 505 - DNA, 2350 bp, Artificial Sequence
  Description of Artificial Sequence: Synthetic polynucleotide
tagggtgtttttttttagtttttaagggagtagtttttagtattgtgttgtaagtgttagtgaaggtgggtgggggtaggtttattgttataggtgtttttggggtttgtgtggtatttaggattgtagttttggatatagtggtaggagttgggagagtttttatagtgttgtgatttgtatagggttgggttttgtttgtgatatttgtttatgtttgaggagagaggttgggtggttggatgtgggaagtagggaggtaagatgggggatataaagaggggagaggagagttagaagggggaggttggggaagtagaggagagggtaggagaagattggggtagaggagagttggggaggttaggagaggaggtgggggaaagaggtaaggggaggggagaagtggaggaggaaagatagaggtgggaggttaattggtgagttggggagttgaagggaggagggattaggttggggtggggttttttattgaggtaggaggtgaggtttgggttagtgtggtgttttggaggatagatgtatttgaaggagttgttggtgttggtatagatgttgttttggtaaaggttttttttgttgtatttgttaatgtttgtgggatagggtgtttgaaggtttggtttattttttgttttgtttaatattttaggttatatttttttattgttttttggtttttttaggttttttatgttttttttaatttgttttatgttatttttttttttgtaaatattgttttttgatgggtttagaatagtttttttataattatggtttaaatatttagatttggtttttttatttttatgttttgtttttttttattgttttgagatttttattagttgttttttgattttgttggaatattttggttaaaaatttgtttttttttttttgtttttttttttttgttttgtttttttttgttttaagtttattttttttggggttaggattagtttgggtatgaattgaggtaagaggttttgtggggtttgggttggtagttaggggtataagtataggtaaaggagttgttagtgttgaggtatttgttgtgagggaagtagaaattgttttttaggtatttgtttatgtttagggtatgtgggagattgggtggagttatgggatttggttttttagataagttttgtttatattgtagtaattttgtttttattaatgttaggtttttaagttttttttatagtgttttggttttgtttttatttttttagttggttttgttttggaatttaggttttatttttagattttttggtgggtttttatgttgtttatttgtgtagggtttgggttgatttgatggtgtttggtagtttggtgtgtagttgtagtggaaggagtttttggtgttagtgtagtggttgtggggattatagggaggggtatttgaattgtatttgtttatatttgtggggggtgggggtgtttagaaagggtttagttttgggatatatttgattaatttttttggagtagggtgtttgggggaggtggtgggaagttttatgagttggaggttgggggagggttttatggtagaggtgggtagggttgattaaggtttttgggttttggggattatggttgtaagttttgtgggtttaggtttttaggaattatttgtgttaggattttggagttaggagagggattagatagggattagaaattaattagggtaagggattagttaagtattataaattaggattattggatgggatttggttgagttatgggttagagttagtgattggaatttgaatttagttaggattagaagttatagttagggtttagaattttgttttaagttaggggttagggttagggattatgaatttaattaggttttagagaagggattttgagaagaggtaggggttgtgaaagagataggattaagagttatatagttaaggttatggttagtgttatggttagtggttatgattagggttaaatgttatagttaaatttaggagttataggttatatttagggttagagttatgagggttataattgttattagggtatgggtagggattattattaagggtgatggttagggttaaatgttattgttaagttgggttttaggagttatatttagggttaagagttgtggtttaggttagggttaggagttataggttttggggattgagggattgaggtttaggttaggaggttatggttaggttatagttgtgatttgggttaagggttgggggttatgatgtaggtttaaggttatagttagggtttggttttattagtgtatttg

SEQ ID NO: 506 - DNA, 2206 bp, Artificial Sequence
  Description of Artificial Sequence: Synthetic polynucleotide
gggtattttttgggatggtaagtggtattagtgttgtgagatggttttttttttgttgttaggtgttaggaggtttgtttgggtttgtatgtgtttgggtttggtaggtggggaggtggtatttagggtagtttttgtattggaagttttaggaatttggatttaggttgaaggtttttgttttagagttttggattgttgagtttggaatagttttttttagatatagtgtggtgtgggagtagttgtatgagggtttatgtattttgtatatattagtagtttatttgattttgtttttggttatgtgaaatgtatgtttatttgatttttgattttgtttttggttatgtaggttttgtttgggttgtgataggaggtttggtgtttttaggtatttggtaggtttttttgattttttttttgagtgataggaatgggaagtgagtaaatttaagtagaattaggaggttttttttagaggagtttggtggaatttggttttggttgtgtgttgagtggtggggtatttatagggagatgagttagtgtttattttttgttttagtttttttgtggttgtttttttttttagaaggggttggtttaggttggtgtttttgtggtttttggagtatatttgttgttgttttttttggtttttggtgatagtaggttttttgtattttatttgttttttagttagtatggttttatatagaatatggttgtagataatttttttgtgttttgtatagtgaattgttattttgtgtgggttttattgttaggttagggaggtaggagttgtttttattttttgtttgggagttgttgtttgttttttggatgagttaggaataaatgtgttaatattgggtggttgtttttgttatttttgtgtatgggttttgtggggagagttaggtagtgggtggtgtgggataggtgatgtttatgtttagtatttaggagatttgtatggtagtttttaagatgggtataagtgattataaggagggatgtatgtgttttatttttttatttattatgggattaggttgaggttgtttagggagtgtatgggagggttgtgtttggtgtatttgtagagattttttgaagaggggttttggttgttttttattggggtaggtgtgggtttaggtttttgatattgtgatggtgttgtgggattttgatggattttatttggggagtttaggtttgttttatggtaaggtggttatgtattgtttttgtagttttgagtataggttttatatgggatttgaggtttgggttttatgatatttgggttatgtgtttttttggtgttttttttttggggatgaaattatatttataggtaaaggtttgggagtggagggagatagtaggagataaagtaaggggatgaggattttggtagttataaaggtagtgggagggttttggaggtttttgttgggtagtgtagttaggaaagggtttattaggtgggagaggtaggtgtttggtgagtgttgagatttgtattatgagaagggttgggtttttaaggtatgtatggggtttgggagtggagggagtgtgagtgggtgttaggatggggtttggggtgagtgggtgttaggatgggtttgggagtggagggagtgtgagtgggtgttaggatggggtttgggagtggagggagtgtgagtgggtgttaggatggggtttgggagtggagggagtgagagtgggtgttaggatggggtttgggagtggagggagtgtgagtgggtgttaggatggggtttgggagtggagggagtgtgagtgggtgttaggatggggtttgggagtggagggagtgagagtgggtgttaggatggggtttgggagtggagggagtgtgagtgggtgttaggatggggtttgggagtggagggagtgtgagtgggtgttaggatggggtttgggagtggagggagtgtgagtgggtgttaggatggggtttgggagtggagggagtgtgagtgggtgttaggatgggtttgggagtggagggagtgtgagtgggtgttaggatgggtttgggagtggagggagtgtgagtgggtgttaggatgggtttgggagtggagggagtgtgagtgggtgttaggatggggtttgggagtggagggagtgtgagtgggtgttaggatggggtttggga

SEQ ID NO: 507 - DNA, 2206 bp, Artificial Sequence
  Description of Artificial Sequence: Synthetic polynucleotide
ttttagattttgttttaatatttgtttgtgttttttttatttttagattttgttttaatatttgtttgtgttttttttatttttagatttgttttaatatttgtttgtgttttttttatttttagatttgttttaatatttgtttgtgttttttttatttttagatttgttttaatatttgtttgtgttttttttatttttagattttgttttaatatttgtttgtgttttttttatttttagattttgttttaatatttgtttgtgttttttttatttttagattttgttttgatatttgtttgtgttttttttatttttagattttgttttgatatttgtttttgttttttttatttttagattttgttttaatatttgtttgtgttttttttatttttagattttgttttaatatttgtttgtgttttttttatttttagattttgttttaatatttgtttttgttttttttatttttaggttttgttttaatatttgtttgtgttttttttatttttagattttgttttaatatttgtttgtattttttttgtttttaggtttgttttaatatttgtttgttttagattttgttttaatatttgtttatattttttttatttttaggttttatgtatgttttgggagtttagttttttttgtggtgtagattttagtatttattaggtgtttgttttttttatttagtgggtttttttttgattgtgttgtttaataggagtttttagggtttttttgttgtttttgtggttgttagagtttttgtttttttgttttgttttttgttgtttttttttatttttaaatttttatttatgggtgtgattttatttttaggagggaagtattagggaagtatatagtttaagtgttatggagtttaggttttaggttttgtatggagtttgtgtttaggattgtagaggtagtgtgtggttattttgttgtggagtaggtttgggttttttgggtgaggtttattaaagttttatagtattgttatggtgttggggatttgggtttgtatttattttagtgggaggtagttagggtttttttttaggggatttttgtagatgtgttgagtgtagtttttttatgtattttttggatggttttaatttgattttgtggtgggtggggagatgagatatgtatatttttttttatgattgtttgtatttattttaggagttgttatgtaggttttttgagtattgggtatgggtattatttgttttatgttatttattgtttggttttttttatagggtttgtgtgtaggagtggtgagggtggttatttagtgttgatgtatttgtttttgatttatttgaaagatagatgatagtttttgggtagggggtgggggtagtttttgtttttttaatttggtagtggggtttatgtagagtggtagtttgttatgtaggatataggagggttgtttgtggttgtgttttgtgtggagttatgttggttgggggataggtggagtatggaaggtttgttgttgttagaggttagggaaggtggtagtaggtatgttttaggggttatggaggtattagtttgggttagttttttttgaggaaggaggtgattatggggagattgaggtaagagataggtattggtttatttttttgtgggtgttttgttatttggtatatagttaggattgggttttgttaggtttttttgaggagagttttttaattttatttggatttgtttattttttatttttgttgtttagggagaaggttgggaaagtttgttaggtgtttgagggtgttgagttttttgttatagtttaggtggaatttgtatgattaggaataaggttggaggttggatgggtatgtgttttgtatgattagggataaggttggatgggttgttgatgtgtgtagagtatgtgggtttttatgtagttgtttttgtgttatattgtgtttaggaggagttgttttaagtttagtaatttggaattttagagtaaaggtttttagtttagatttaagtttttagagtttttaatgtgggggttgttttgggtgttgtttttttatttgttaagtttaggtatatgtagatttgagtaggttttttgatgtttgatggtaggaaggaaattattttatagtgttggtgttatttgttattttagggaatgttt

SEQ ID NO: 508 - DNA, 2233 bp, Artificial Sequence
  Description of Artificial Sequence: Synthetic polynucleotide
ttgttggatgtggatgtagatagtgggtttttttatattaagtagtgtattgattgtgagtttttgtgttgttataatgttaagtgttagttgttttttgaggtgtttgttaatgataaggagatttgtatgattaaggtagagatttaggatattaatgataatgtgttttttttttttttggattagattgaaatggatattttggagaatgttgttttgggtatttgttttttttttattagtgtatatgattttgatgttggtgagaatgggttttgtatttatttgtttatgtgtgatgattatggtttttttggattggatgttaagttttgtggtgatggtattaagtttttagaattggttatttagaaggttttggattgtgagtaatagaattattatatgtttgtgttgattgttttggatggtggtgagtttttatgttttgttattgtatagattaatgtgaaggtgattgattttaatgataatagtttggtttttgaggtgttattttatttggtggaattgtttgagaatgttttgttgggtatagtggttattgatttgaatgttattgatgttgatgaaggttttaatggtgaagtgttttatttttttagtagttatgtgtttgattgtgtgtgggagtttttttttattgattttaagattggtttaatttgtgtgaagggtaatttggattatgaggaaaatgggatgttggagattgatgtgtaggtttgagatttggggtttaattttattttagtttattgtaaagttatggttaagtttattgattgtaatgataatgtgttgtttattggttttgtttttgtgtgttagggggtgttgagtgaggttgttttttttggtattgttattgttttggtgtgggttattgattgggattttggtaagaatggatagttgtagtgttgggttttaggtggaggagggatgggtggtggtgggggtttgggtgggtttgggggttttgttttttttaagtttgaggagaattatgataatttttatatggtggtgattgattgtttgttggattgtgagatataagatgagtataatgtgattattgtggtgtgggatgggggtttttttttttttaattttattaagttgtttgtgattaagattttagatgagaatgataatttgttttggtttattaaagggttttatgtgttttaggtgtatgagaataatattttgggagagtatttgggttttgtgtttgtttaggattttgatttgggttagaatggtattgtattttattttattttgtttttgtatattggtgatgtgtttatttatatttatgtgtttgtgaattttatgaatggggttatttatgttttgtgtttttttaattttgagtagattaaggtttttgagtttaaggtgtttgttaaggatttgggggtgtttgtgtatttggagagtaatgttatggtgagggtgatagtgttagatgtgaatgataatgtgttagtgattgtgttttttatgttgtagaatgatattgtggagttgtaggtgttgtgtaatgttggtttgggttatttggtgagtattgtgtgtgttttagatagtgattttggtgagagtgggtgttttatttatgagattgtggatggtaatgatgattatttgtttgagattgatttgtttagtggtgagatttgtatgttgtattttttttgggaggatgtgatgtttgtggtggagttggtggtgaaggtgattgattatggtaagtttattttgtttgtagtggttaagtttattatttgtttggtgagtggatttttttttgagggggtattatgggtgaatggtgagtagtattattgggatatgttgttgttgtttattgtgattttgagtattatttttattatttttttagtggttatgattattattgttgttaagtgtaagtgtgagaataaggagatttgtatttataattgttgtattgttgagtatagttatttgtagttgggtgggggtaagggtaagaagaagaagattaataaaaatgatattatgttggtgtagagtgaagtggaggagaggaatgttatgaatgttatgaatgtggtgagtagtttttttttggttattttttttatgtattttgattattagatttgtttgttttttagtttgttttggttggaggtgatgtattttaaat

SEQ ID NO: 509 - DNA, 2233 bp, Artificial Sequence
  Description of Artificial Sequence: Synthetic polynucleotide
gtttgagatatattatttttgattggggtgagttgaggggtaggtgggtttggtagttgaagtatatgggggaggtggttagggaggggttgtttattatgtttatgatgtttatggtgttttttttttttattttgttttgtattagtatgatattatttttgttgatttttttttttttgtttttgtttttatttagttgtgggtggttgtatttggtgatgtggtagttgtaagtgtggatttttttgtttttgtgtttgtatttgatggtgatggtgattatggttgttaggaggatgatggagatagtgtttagagttatgatgagtggtagtgatatgttttagtggtgttgtttgttatttatttgtggtatttttttgggaagggatttgtttattgagtggatgatgagtttggttattgtggatagggtaggtttgttgtggttggttatttttattattagttttattatgggtgttatgtttttttagaaagggtgtagtgtgtggattttgttgttggatgggttgattttaaataggtggttgttgttgttgtttatgattttgtaggtgagatgtttgtttttgttgaagttgttgtttagggtgtgtatagtgtttattagatagtttaggttagtgttgtgtggtatttgtagttttgtggtgttgttttgtagtgtggggagtatgattattggtgtgttgttatttatgtttagtattgttatttttattgtggtgttgttttttaagtgtgtgggtgtttttgagtttttagtaagtattttgaatttaaaagttttggtttgtttgaagttaaaggagtgtagggtgtagatggttttgtttgtgggatttatagatatataggtgtagatagatatgttgttgatgtgtgagggtaggatagagtaggatatggtgttgttttggtttaggttgggattttgggtgagtatagagtttaggtatttttttgggatgttgtttttgtgtatttgaagtatgtagagttttttggtgaattgaggtgggttgttgtttttgtttagaattttgattgtgaatgatttggtggagttgaggggaggagagtttttgttttgtgttatgatggttatgttgtatttgttttgtgttttgtggtttagtgggtggttagttattattgtgtagaagttgttgtagttttttttaagtttgaaggggatggaatttttgggtttgtttaggtttttgttgttgtttgttttttttttgtttaggatttgatattgtagttgtttgtttttgttagagttttggttagtgatttgtattagggtgatgatggtgttgggaggggtggttttgtttagtgttttttggtgtatggagatgaaattgatggatggtgtattgttgttgtggttgatgagtttgattgtgattttgtagtgggttgggatagggttaggttttaggttttgggtttgtatgttaatttttagtattttgttttttttatagtttagattgttttttatatggattaggttggttttggggttgatggagaagagtttttgtatgtggttaggtatgtagttgttgaaagagtagagtattttattattgggatttttattggtgttggtggtgtttagattgatgattattgtatttagtggagtgtttttgggtagttttattaagtaggatggtgttttgaagattgggttgttgttgttggagttaattatttttatgttgatttgtatggtggtggaatgtggaggtttgttattgtttagggtagttagtatgagtgtatggtgattttgttgtttgtggtttagagttttttggatgattagttttgggaatttggtgttgttgttgtgggatttaatgtttagtttaaagaggttgtgattgttgtgtgtgagtaggtaggtgtggagtttatttttgttggtgttggggttatgtgtgttggtgagggggaagtgggtgtttggagtagtgttttttgagatgtttattttgatttggtttgaggagaaggagggtgtgttgttgttgatgttttggatttttattttgattatgtagatttttttgttgttggtgaatattttgagggatagttggtatttggtattgtggtggtatagggatttgtggttgatgtgttgtttggtgtagaggagtttgttgtttgtgtttatgtttagtag

SEQ ID NO: 510 - DNA, 2398 bp, Artificial Sequence
  Description of Artificial Sequence: Synthetic polynucleotide
attgtatttttggttttatagttttttattgttgattttaggtttttttggattttaggtttttttttttaagatgtattttagaggattaaaaatatattttatttgggttttgtttgtttttgtggaagggtagtttattagaggatataattttgtgttttaatttgtttttttttttaaaggaaatgtggagaaaaaaaaaaagtagaaattggaaataattaatatttagtttattttatttgatttttaggggaattggtgaggagtttaagatgattttttttttttagagaaagaatttaaagtttagggaaatagtgataggggagtttaagattgtttttgttagtttttttttggttattttttgttgtgattgtaggatagtttttattagtaggagaattgggtaagtgtgtggataagtagagagtgtgttgaataatttgtaatgttttatgaaatatgtattgttatggttttttaaaaggttttgtggaagttgtttgtttttattaattaagtttttatttatataaaagtagaagtagaagtagttttagaaaatatattaataattttttatttttttgaagattagagtagtagaaaataggtgatttgtattataaaattgtatttatttttttttttttttagattttatattatattagtttatttgtgttatggtgtataaaaaatggaataggtgtttttattgtattgtttttttttaaaaatagattatttatattttaattttgttttttttaaatttgatttttaataggagagttttttattattttagatggagtgaggttgtatgattgggatggaagaaaggaattttttaaatttgggggaatttttgttttttgttttaagattattttatttggggtgtgggggtgggtgtggtggttagggtagtggaatgtagttgtggttgtgttatttttgtatttttaggtgtgtgggagggattggtggggatgtgagttgtggattttggtgaatttgggggaggtagatagggggaggtggatatttagttggtaggtgttttagtttttttgtagttggtgggttttttttttgatagttttaggaaaggtagattttttttttagttagttaggtaaggtaaagattgttgttgagtttgttgttattgagggtgtatagattttggggagattgaagtttgttattgtgggattttgtggggtaatttgggtttatggaagttttttgaaagaggggagaagggtttgtattttttttatggaggatttttttttttttagtattttgtttgatgtatttaattggtagaagtgagattttaataggtagtagagagtgtttatgtggaggaggtttggggtgttgtggtgttatttttatttttttttgggattgtgtttatttttaaagttatatgttgatgaattaatttatgttttaaatttttttttttagttttgtgagtttgtggtgatattgggttgtggggtggttgggaatggtttttttttttggaaaaattagagaatggtttggagagttgaaatgagtgtttgtgagtaggtttgtgtagaattgggttttaggattgttgagttttgtagggtgtttttgggggatgttaggttgttggtttttttgtttttgttgagatggataatgttttgtttttggagttttggtttgttaatgtattgggtttggatttggtgttgagttgttttaatgtgttgattttggtgttgttgttggtgttgttggtggtggttgtattagttgtttatgtggtgatttgtgttgtgggtttggtgggtaattttgttgtgttgtatgtgttgttgtgggtgttttgtatgaagattgttattaatttgtttatttttaatttggttattgttgatgagttttttatgttggtgttgtttattaatattgttgattttttgttgtggtagtggttttttggggagtttatgtgtaagtttattgtggttattgattagtataatattttttttagtttttatttttttattgttatgagtgttgattgttatttggtggtgttggttattgtggagttgtgttgggtggttggttgtatttatagtgttgtgtgtgtggtgagtttggttgtgtgggggattgttatatttgttgtgttgttttttgtagtttttgtttggttagatgatgagtagggttggtgttagtgtgtgttagtttttttgtagtttgaggttttttggtggtgtgtgagttgtttttatatgtttgtgttgggttttgttatttttgtgtttattatttgtgttttttatattattttgttgtgttggttgtatgttatgtggttgga

SEQ ID NO: 511 - DNA, 2398 bp, Artificial Sequence
  Description of Artificial Sequence: Synthetic polynucleotide
tttagttgtatggtatgtagttggtatagtagggtggtatagaggatatagatggtggatatggggatggtgaagtttagtatgagtgtgtagaggtggtttgtgtgttattagaaggttttgggttgtggaaagattagtatgtattggtgttggttttgtttgttgtttagttgggtgaagattgtgaagggtagtatgatgagtgtgatgattttttatatggttaggtttattgtgtgtgtggtgttgtaggtgtggttggttatttggtgtgattttgtagtggttaatattattaggtagtggttggtgtttatgatggtgaggaagtagaggttggagaaggtgttgtattggttgatagttatgatgagtttgtatatgagttttttgaagggttattgttgtagtaggaagttggtgatgttgatgggtagtattagtgtgaagagtttgttggtgatggttaggttgaggatgaataggttggtgatggtttttatgtggggtgtttgtagtaatatgtatagtatggtggagttgtttgttagatttatggtgtagattattgtgtagataattggtatagttattgttagtggtgttggtagtggtgttagagttgatgtgttggagtagtttagtgttgggtttgggtttgatgtgttggtgggttagggttttgagaatgaggtgttgtttattttaatgagggtagaggagttggtgatttggtgttttttaaggatgttttatggagtttagtggttttgaagtttggttttgtatggatttgtttgtggatgtttgttttagttttttaagttgttttttggtttttttggaggaggggattgtttttagttattttatggtttaatgttgttgtggatttatggggttggaaagaggaatttaaagtataggttagtttgttgatgtgtaattttagaaataggtgtggttttgaggaggggtgggggtggtgttgtggtgttttaaattttttttatgtgagtgttttttgttatttgttgaaattttatttttattagttgaatatattaaatgaaatgttagagagagaagaattttttataggaaaaatgtaaatttttttttttttttttaggaaatttttgtagatttaggttattttatagaattttgtagtggtaagttttggtttttttagggtttgtgtgtttttagtaatagtaagtttaatagtagtttttattttatttggttggttggggaaggggtttgttttttttggagttgttaggagaaaagtttgttggttgtggggaggttgagatgtttgttggttgggtgtttgtttttttttgtttgttttttttgagtttgttagagtttgtagtttgtgtttttgttggttttttttgtgtgtttggaagtgtagggatggtgtagttgtgattgtgttttattgttttgattgttgtgtttatttttatattttaagtaaaatggttttggaatagagaatagaaatttttttaaatttaagggattttttttttttattttagttgtgtaattttattttatttgaaataatagaaagtttttttgttaagaattgaatttaaggaaaataaagttagggtgtaagtgatttatttttaaaggagaataatgtagtggaggtgtttgttttattttttatatattgtaatataaatgggttaatgtaatgtgaaatttgaaaggaggaaaaagtgagtgtaattttataatgtaaattatttgttttttgttattttggtttttaaggggatagaagattgttagtatgttttttaaaattatttttatttttatttttgtgtaagtaaagatttgattagtaaagataaatggtttttgtaaagttttttagggaattatgataatgtgtattttataaaatgttataagttgtttaatatattttttatttatttatatatttgtttgatttttttgttaatgagagttattttgtgattgtagtggagagtagttaaggaaggattagtaggggtagttttgaatttttttgttgttatttttttggattttggattttttttttaggaagggaaaattattttaggttttttattagtttttttaagaattgaatgaaataaattaaatattggttatttttaatttttgttttttttttttttttatattttttttaggagagagagtaaattaaaatatgagattatattttttagtaaattatttttttataaaagtaggtgaagtttaaataaagtgtatttttggttttttaggatgtattttagagaagggggtttgagatttagagagatttaaagttggtagtagaagattgtggggttagaaatatagt

SEQ ID NO: 512 - DNA, 2114 bp, Artificial Sequence
  Description of Artificial Sequence: Synthetic polynucleotide
aaagttatagtagaagggaagttgaagtttgaaaatatattatattttgttttttggtttttaaatttttttagttaaaaatttaggtaaaattattatatttaatatagtaattatttgtaaaattttagaatagtaaataaaggatataaagaaatgtatttttattttttttaaattgaaaataagtaaaatattatagaattagattttgttttattatataggaattgtttggtaaagattttttttttttttttaaaggtgaaattttaggttgttgaatattgaatgggtaaagatttttataatgttgtatttaagtgagtattaatgattttatttattaataatgattattttttgggaataagaatttattaggaagtaatttttaaaattttataaaggatttaattggtttttataatatggttagtagttatatgtaaattttatttggaagattggggtgaaattaaggggttggtgaaggaatttaggaaaattaaaatattaaatttatttttaatagttgataatgttatgttttaagagaagaaaaagagtatattttgttatagtgtgtgagaaatttaatttttgtttttggatgatggtggtatgttattttttttaaagttaggtattagtgtgagtagtgttttagagaggtgaatgtgtagttgtgttagatatttatagttttatttttaaaagatatatgggaaaatagttaaaagtttttttataattgtattaatttgattaataggaaaataagtggaaaatgtagttttattaaagtagagtagaggtttttttttattaaatttttaggagggggaggggagaatatagaatggttagggggtattttttggaagttgaagagagattaaatgatgatttttatattttttttgttgtttaagtgttgaaattaatttagattttatttttttttttatgttaattttggattttttgagtaatttggagtttatgttttaggttttttgaagattagaagtttaagaagatgggaatttttagaataataattaggggaaattgtttatttgaagggttaagggtagggggttgtgtttggtattttattgagattttgtttattgaaaatattgtttttaatgaaattatttagtattttgttttatttgtgtggttgttttttttatagtggtgtaatttgtgttagttgattgtttttaggattgttgtaaattttttgatgagtagtatttagaaggggttttagtaaaaattatgtgttttaaatttttaaagttttgtttgggagagaggttgatatttgtatatgaagtttgttttttggaaatagtaggaggatgtaggaggggtgaagtaattttgggaagatgttttttttttttttttatggatttagtgtagtttttggtataagtaattttgttattgggtggttttttttaatttgtgtgggggttgatattaatataagtagttgtttttttgggtgtgagtgggattttaggtttgggatgtggtgggtgtggtgtgggagaggtatttgttgttttttttatttggatgttagaggtaagttgtttgtgtgaatttgagtgaatgattggaggttggttgttgtaggtttatttttttaggatgtgggttttagggggtgttttgatgtgatttaattttgattgtgaaaataattgttaggggttggttggattgttgttggtttttttttttttggtggttttgtttggtttgggtttagtttgggaataaatttgttttatattaatatttttttttatattgggtgttgttgttttaattgtgtgtggggggtgaggtgtttattttgtataagaatagaggagtgggggagaagagatggttttgttgtttattgggtaagtggagtttagttttgtttgggagtgggtaggagagatagggtagtgatttttatttatattagaaaatttttttttttggtgattttgttgttaatttgagttggttatagatagtttagtgagtttttaattataaggatgagagaaaagtatggtgttttttgagttttttttgtt

SEQ ID NO: 513 - DNA, 2114 bp, Artificial Sequence
  Description of Artificial Sequence: Synthetic polynucleotide
ggtggagaggatttgaggggtattgtgttttttttttgtttttgtaattaaggatttattggattgtttgtagttgatttgagttggtagtaaaattgttggggggaggggttttttggtgtgagtgggggttattattttgttttttttgtttgtttttgagtggggttgggttttgtttatttagtgagtagtgaggttgtttttttttttttgtttttttgtttttgtgtggggtgggtgttttgttttttatgtgtagttgaggtgatggtgtttgatgtagaaggaagtgttgatataaaataagtttgtttttaaattaaatttaaattaagtaaagttattaggaggggaaaaattaatagtaatttagttagtttttagtaattgtttttatggttggaattaaattatattaaaatgttttttgaaatttatattttgaaggagtgaatttataatagttaatttttagttgtttgtttgagtttatatgaataatttgtttttaatatttgagtgaagggggtggtgggtgttttttttgtattgtatttattatattttggatttgggattttatttgtatttgaagaggtggttgtttatgttaatattagtttttatatgaattagaaaagattgtttggtgatagaattgtttatgttaggaattatattgaatttgtaagggagggggaagaatgtttttttggggttattttgttttttttgtgtttttttgttgtttttaaaagatagattttatgtgtaaatgttaattttttttttaaatgaagttttagaaatttggggtgtatggtttttattaaagttttttttaagtgttgtttattagaagatttataataattttaaagataattagttaatataagttatattattgtaaggaaaatagttatgtaaatagagtaaggtgttgggtgattttgttagaaataatgtttttaatggatggggttttagtaaaatattaaatgtagttttttatttttggttttttaagtaaatagttttttttagttattgttttaaaaatttttatttttttgagtttttaatttttaggaaatttggagtataggttttaaattatttggggaatttagagttaatatgaaggagaaagtgggatttgaattagttttagtatttaaatagtgggggggatgtaagagttattatttaatttttttttggtttttagaaagtattttttggttattttgtgttttttttttttttttttgagggtttgatgaaaaggaatttttattttgttttggtgaaattgtattttttatttgtttttttattggttaaattggtgtagttatgggaggatttttgattgtttttttatgtgttttttaagaatggggttataaatgtttgatatagttatatgtttatttttttgggatattatttatattggtgtttaattttaagggaagtgatatattattattatttaaaaataaaaattgggttttttatatattgtagtagaatatattttttttttttttttgaggtatagtattgttagttattaaaaatggatttaatgttttaatttttttggatttttttattaattttttaattttattttaattttttagatagaatttatatgtgattattggttatgttgtagggattaattggattttttgtaaagttttaaaaattgttttttagtaaatttttatttttaagaagtagttgttattagtaggtgaagttattagtgtttatttagatatagtattgtaaaaatttttatttatttaatgtttagtagtttgaaattttatttttaggaaaaaaagagggatttttgttagataatttttatataatggagtaaaatttgattttgtagtgttttgtttgtttttgatttaagggagatgaagatatatttttttatgttttttgtttattgttttgaagttttatagatggttattgtattggatataataattttgtttagatttttaattgagggggtttgagaattaagggataaaatgtaatgtgtttttaaattttagttttttttttgttgtaatttt

SEQ ID NO: 514 - DNA, 2382 bp, Artificial Sequence
  Description of Artificial Sequence: Synthetic polynucleotide
aggttttggaggtggttattgttggtttaggtatggttttgtttgggattattggttgtttttgtggggtgttttgtttggggtttttttttattttgggatgttttaggtgtgtttagtttgagttggtggagagggtgggggtgggggtggttggggttttgaagtttaggtttttttttttatttttttgttggttttgttgttgtggtttttgtttttgtgtttgtttgtttttgagttttttttttttttttttttttttttttttttttttttgtagtagtaataatttgattttgttttttttatttgttttttgagatgttttttatatttgtttgtatatagtgtgtgtggtttttttgaaggtgatttttgtaaattgtgatgtaggttttttgttttaggtaatttttgttgtgggagaggttgttttttggtgtttatgttttttttttgtagtttttattgttggttgagggggaaatgggtgataggggaaggggaggtgtgtgtgggatggattaggttggggtagaggggtttaaattggtgtggttttatagaagtttgaggagggtggggttggttttgagtttttggagttttatgggatttttttgattttattgaggagtttttgttagttttgtgtatttttgtaatattttttattttatttgttagttttgagtttatagttttttgggtttggggattggttgggggaggggatgggggggaggggattttttggttgtagggaatggtgtgtgggtgggggtgggagggaaatgatttgttttaggagatagggatgaaggtttttttgagttaagggagggagaagagaggtggaataaaaggtagatgttggaggggaaggggagttggggagtttgttttgagggttttggtagtttgtggttttttgttttagtttgttttagagggtgaggttaaggttggtgttagggttttttattggttatttggattttatgtgtttagtatttatttttttttgtatgtttattttatgtatttttttgtgttttttttatggtttttttgtggtgagttgtttttgtttttttgtaggtttttggttttagtgttaaggtattgtggttttttttgttttttttttgtgttgaatttgggttttttgtggggagaaataggttgggggtgaggggtttttgagataatttaggatatttttttggggtttagttaggtaattttgatgtttatggatttttggattatagtttttattgtgggtttagttttatttttagtttattttgtggtgagtgttaagttttaaaagttggagtgttattgtttggtgattttgtgtttgtttgtgttttttaatttatggttatttgtttgttatagtgaatttttttttaggaaagaatttgttttttgtaaagaggatgtgtaatgttggaaagtttgtttttttttttattagttggattttgagagttgggagagatgattaatgaataggttgagggtgttatagttttgttattttgggatggggggtgtagtaggggagttatagtttttttagaggttaggttattttatttagttgtattttatttttaattttttagtgggtgatatttgtagggtgttgggattgggagaaattttagatattttaaattttaaattttattttttagatgaagatattgaggtttagagtgggttagtgagttgtttaaggttataggataggttagaatggaagttttttgattttttttggggtgttgggtttatagttttattttgttattttttgttttggaagtgagtattgaagttatttaagagaggttagtgattaaaggtagtgatttttaggtgtagaggttggggtagatgtgtttatgagtttgtttttttgtgtatttttttttattttgtttttatttttgttttggttattatgtgtttttattattttgagatttagagaggtgtagtggtttgttgaaggttatatagtatattgagtagggtttttgtttttattgtttagttgtttttttttattgtttatttgggtttttgtaagtttgttaggatttttgggagtttgttttttttaatgtatagagttgtggtgtgtgttaaagtgtgggaaagtttttgggagagggaaggggtagaaaatatagttgtttattttaattttggatggttgtggtaaggtaggggtgtttagaaaggtagttagttttgtgtattgttggtgtttttggtatattttattttgtgttaggggttttttagggttgtgtgagtatgtttttttagtttttttttagtgaagtaggtgtggtgggg

SEQ ID NO: 515 - DNA, 2382 bp, Artificial Sequence
  Description of Artificial Sequence: Synthetic polynucleotide
ttttgttgtgtttgttttgttgaggaggagttggaagaatatgtttgtgtgattttggggagtttttggtgtagagtggggtgtgttggaggtattggtggtgtgtaggattggttgtttttttgagtgtttttgttttgttgtagttgtttaaggttgagatgagtggttgtattttttatttttttttttttttaggaatttttttatattttgatatgtgttatggttttgtgtattggaggaagtaggtttttggggattttggtaagtttgtagaggtttgggtgggtaatgggagggggtagttgggtagtggaaatgagggttttatttagtgtgttgtgtgatttttgataagttgttgtatttttttgaattttaggatgatggaggtatatggtaattaagataggaatggggatgaggtgggggagggtgtgtgggggaataagtttatgggtatgtttgttttagtttttgtatttgggaattgttgtttttggttattggttttttttaagtgattttagtgtttatttttggggtagggggtggtaaggtggagttgtgaatttagtgttttggggagagttggaaagtttttattttgatttgttttatgattttgggtaatttattgatttattttgggttttagtatttttatttggaaaatggggtttggaatttaaggtatttgaggttttttttagttttaatattttgtaggtgttgtttattgaaaggttggggatggggtgtagttgggtagaatgatttggtttttgggaagattgtagtttttttattgtattttttattttaaagtagtagggttgtgatatttttagtttgtttattggttattttttttaatttttagaatttagttgatggggagaaaggtgggttttttagtattatatattttttttgtagagggtagatttttttttagggaaaggtttgttgtgatagatagatgattataggttaagaggtgtgggtggatgtggggttattaaatggtgatattttgatttttggggtttggtgtttattgtgggataaattaagagtaggattgagtttgtggtgggaattgtaatttggaaatttatgggtgttggaattatttggttagattttggggaggtgttttgaattattttgggaattttttgtttttaatttatttttttttgtggagagtttgggtttaatgtggagagaaggtgagagaagttgtggtgttttagtgttgggattggggatttgtggggaagtaaaggtgatttgttgtagagaagttgtgggaagggtgtggggaggtgtatgaagtgggtgtgtggagagaagtgggtgttgggtgtgtgggatttaggtggttggtgaagagttttggtattagttttgattttattttttgggatagattgaggtaggggattgtgggttgttggagtttttggggtgagttttttagtttttttttttttttagtatttgttttttgttttatttttttttttttttttttgatttaggaaaatttttatttttattttttgaagtaaattgttttttttttatttttgtttgtatgttgttttttatagttagggggtttttttttttttgtttttttttttagttaatttttggatttgagaggttgtaaatttggagttggtgggtggggtggggagtgttgtaggagtgtatggagttggtggggattttttagtagaattgggggagttttgtagggttttgggggtttggagttggttttgttttttttaaatttttgtaggattgtgttagtttaaatttttttgttttagtttagtttgttttgtatatattttttttttttttgttgtttattttttttttggttggtagtaaggattgtagaaggggggtgtgggtgttaggaggtggttttttttgtagtggggattgtttggggtggaggatttgtgttgtggtttgtggggattgtttttggaggggttgtatgtgttgtgtgtaggtggatgtgaggagtattttaagaggtgggtgggggaagtgggattaggttgttattattgtagagagagagagaggaagagaagagagagagggagagatttgagagtgagtgagtgtgggagtgagggttgtagtggtagggttggtggggaagtgggaagagggatttggattttgggattttagttgtttttgtttttgttttttttattagtttaggttgaatgtgtttggaatgttttagggtaagagggaattttaggtggggtattttatgagggtagttagtagttttgagtgaagttgtgtttggattgatagtggttatttttagggttt

SEQ ID NO: 516 - DNA, 2192 bp, Artificial Sequence
  Description of Artificial Sequence: Synthetic polynucleotide
ttatataatttttaaaaagaaagaaatttttaaattatagatgtgtttggaattagaatttagaaagtatttgggtagggaaaatagtttttagtgtttaaggttaaagttagtagggtttttttggatgggaaagagatatgagattgtaagtaatttttggatattatttatttgttattgtgtttttatttttttttttagttatttatatgttttttttttttagttaaaatgaatttaatttttgttatagtattttattttgttaataaaatttaggattgaagaatgagaataaaagggttttatatttattattttttaatttttgattttagtttggatagaataattatttattttagaaaattggtatagggagtatttattagtagttgtaatatattattgttaaagggagggattttgtaaggtggtattgggtgttttatatgtatgggaaatttgaggttatgtttagtgttaattataagtatttttatttttggttaggtaagttttgatttttgaattttgagtttttaattttttttaaaatgagaaagagatggttttttttagagttttttagtttttaatttataggtaaatattattgtatgttgttttttagtagagattggttttaattaaggtaaataagttaggatggattttgttgattgtgatggtttagtgttatattttatatattttattattttttagaatatttaatagtgttgtttttggtagttttggggttgtagtttttgtagagaggaggaattggtattgaaagaaatagttgagttttattatgttatgtggggtgtttttattgttaagagtaattttttttttttgggaagaaaagtgtgggtggggttggggtagttttttttttttgtgttgttttggagattatgggtgtttagttgtagttgttgttggattggttttggttgttttgagaggtgttttttgtaggtggggatgtggttaggttggatgtaaggtttttttttaatttattgggtttagggggatggttaggggttgtttagtttatttggtgggttagggagggggatggtagaggttggttgggtttttttagtatatagtaggtgtttaattagtgtgatttgaattaggttattttttttttttaatttttttttttgtgttttatggagggtggattagggttttggatgtgaattttgtgttgtattagagttttagttttaattgatattttgagtgttgttaatttttttttgaagagtatggtagagtgaagtataagtaataattttgtattatttgtgtttttagagtttttttggatttgtgttatgtgtggtggggagaattggttttttgtttgagtttagagtttatttgaggttagttttattgttttgttgaaagttaaaattttaagttgatgttttttagttgtttattttttagtagagagtttttttttggggagttttgttttggggtgttgttttgaggttagatgttgttttgtttggatttgaatttgagtttgggatgggtgattttttaattttaggaattggaattgagatattaaagtttagatgtgttttttggatgatggttttttggtaggggtatttagttagtggttaagatgttgttagtggggaaggtgatttaggttttgaatgggaaagtttattagtagattttttaggttgaggtaggagttgttttttgttttgtttttttttatttttttttttttgtttttttttaaattttttttttttttagggtttttttattggaaattgaataaaataagggttttgaaattattttgattttaaaaataatttttgtttgtttttaaattgtattaatataaaattagaatgttagtttttgaaaattagaaaatttaaattaaaattttaaatgtaaattatttagaaatagtttggatggaattattgggtgatttttgttttttttatgtataaaaatatgattaatttttgtatttaaaaaataggttttattttgtattagtgttttgaaatttgttttttttttataatagtattttatagatttttttttatgtttgtgggtgtttatgtattttattatattgagtagttttttatttgttgatttaggatttttat

SEQ ID NO: 517 - DNA, 2192 bp, Artificial Sequence
  Description of Artificial Sequence: Synthetic polynucleotide
atgggagttttaggttaataagtggggagttgtttagtatggtgaaatatatgggtgtttatgggtatagaaaagggtttgtgagatattgttatgaagaaaaagtagattttaaaatattagtatagaatgaaatttattttttaaatataaaaattagttatgtttttatgtatgggaaaaatagaggttatttagtggttttatttaggttatttttgagtaatttatatttaaaattttaatttaagttttttaatttttaagaattgatattttaattttgtattggtatgatttaagaataagtaagaattatttttaaaattaaagtaattttaaagtttttgttttatttaatttttagtagggaagttttgggagggagggaagtttggaagaaagtaagggaagggggatggagaaaagtgggatagagggtggtttttattttagtttggaagatttgttggtaggtttttttatttggaatttgggttattttttttattgatgatattttggttgttggttggatgtttttgttgggaagttgttgtttaggaaatgtgtttaggttttggtgttttaattttaatttttgaggttgggaaattgtttgttttaaatttaggtttaggtttaggtgggatgatgtttggttttgaggtggtattttagggtaggattttttggggaaggattttttgttggggggtaggtggttggggaatgttgatttagggttttaatttttaatgaaatgatgaaattaattttagatgagttttgaatttgagtaggaggttggttttttttgttgtgtatggtgtaaatttgaagggattttgggaatgtgaataatataggattattgtttgtgttttattttgttatgttttttggggaaaagttaatggtgtttaaggtgttggttgggattggaattttaatgtggtgtagaatttgtatttgggattttaatttattttttatgggatatagggaggagaattggagggagagagtaatttgatttaggttatgttaattaggtgtttattgtgtgttgagaagatttaattagtttttgttatttttttttttagtttgttaagtagattgagtagtttttggttgtttttttgagtttggtagattggagggaggttttgtgtttggtttggttgtgtttttgtttgtagaaagtattttttaaggtagttagggttggtttagtgataattgtagttggatgtttatggtttttaaggtaatgtggaggggagggattgttttggttttgtttatgtttttttttttagggaggggagattgtttttagtaatgggagtgttttatgtggtgtagtgaaatttaattattttttttaatgttagttttttttttttataaggattataattttagggttgttaggagtagtattattaaatgttttgaaaggtggtaggatatatgagatgtagtattgagttattatggttaataaagtttattttaatttatttgttttggttaaaattaatttttgttgggggatagtatatggtagtgtttgtttgtaagttagaagttgaaagattttggaagaaattattttttttttattttaaaagaggttgagagtttaaaatttagggattaaggtttgtttggttagagatgaaaatgtttgtggttggtattgaatgtggttttgggttttttatatatatgagatatttagtgttgttttatagaatttttttttttggtagtgatatgttataattgttaataaatgttttttatgttaattttttagaatgagtgattgttttgtttagattagaattagaaattaagaaatggtgagtataaaatttttttatttttattttttagttttgggttttattaataaggtgaagtattgtaataaagattagatttattttagttggaaaaagaaaatgtgtaggtgattgagggaagggatgaaaatataataataaataggtaatgtttaggaattatttgtagttttatattttttttttatttaaggaggttttattggttttggttttgaatattagaaattattttttttatttagatgttttttgggttttggttttaggtatatttgtaatttaggggtttttttttttttaaaaattatatgg

SEQ ID NO: 518 - DNA, 2192 bp, Artificial Sequence; identical to SEQ ID NO: 516
  Description of Artificial Sequence: Synthetic polynucleotide

SEQ ID NO: 519 - DNA, 2192 bp, Artificial Sequence; identical to SEQ ID NO: 517
  Description of Artificial Sequence: Synthetic polynucleotide

SEQ ID NO: 520 - DNA, 2244 bp, Artificial Sequence
  Description of Artificial Sequence: Synthetic polynucleotide
  modified_base (2126)..(2126): a, c, t, g, unknown or other
  modified_base (2128)..(2128): a, c, t, g, unknown or other
  modified_base (2131)..(2132): a, c, t, g, unknown or other
ttttatttttttttttttttttgttttttttttatttttttttttttttttttttttttttttttattttttttttgtttttgagtttttattgattgatttttttttattttatttgttttttttttaatgtgttaatttttgttttatttttgatttttttaggtattgggaggtgggatgggggtgtgtgtttttttttaggagttttgtttttttaagatttatagaaattaggatttgtttttatttaaaattttatgtattttaagttttttttagataatatattttaattttttgggttgattagtttttttgtgtagaggtagttgagaggttttgttttgtagagggaaaagagttttttatttttttatttattatataggtaaatttatttggttattggttgaaggtatagttttgtttttgtggggaattggtggttaggatataatagtgtttttggagtttatttttggttttggtgttggtgtagggattttttgattgggtttgaggggtttgggttagttttaatgttattatttatagtgagggtagggtgtaaggttgagaaggttatatttattgttttgggaggatgtgggagaagagattgaggtggaaagtgttttgttttgtttattggttgtttttgttttggttttagtgtttgttgggatttgttaggatttgttggggttttgggagattttgagtatttgtaggaagaggtgttgagaaattaaaaatttaggttagttaatgtatttttgttgttggttgtaggttttgtttttgtattaagtgggtgttgattgtgtgtgtttggtgattgtggggaggattggtggtttgtgggaggggatgggtagaggtgtgggttatattgttttggagttggtttggttttttgtgttttttttagtggttaagttgtgaggtatagttttttattgttttaggagtatagaaattttttgtgtgggtggtgggtgtgtgagttagagggaaagatgtagtagttattgtgattggtatgtagttgtgtgtttttgtgtgtatggattttgtgtggtgtgtgtggtgattgtgttgtttttaggagtaagttatgggtttagaggggtaaaatgtttaggttttttgttgggaaggatatattatattttatggtaagttagggtgggtgattttttatggattgggtggaggggggtattttttaggattggtgggtggtttaggggaataatttgtggtggtgatgatttgtatagtgtgggttttgggatgtgtgtggttttgagttagttttgtatagtttgtttttggagttgtgagtttaggtttttatttttgattttttgggttttttttgtattgttgagtttagtttgtggggtgtatttgattaatgtttgatagggttggggaatgtgataggtagtaggtttatttgggtttggggagggggagtttttgttttgatagtatttttttttgttgtttgttggtggatttttatttttagttggtaattgttttgtagtgttgatttaagaaggtaaagaaaattaggtttttttgtaaagagttttttttaaattggtggattttggatattttgagtggatttagaaatttatgtaattttttttttttagtttattttttatttttttttatagttttttttgatttgttgttggtttggggtaagataaagtagttagtagagagtgataataatagtggtgggaaatgaattggagattggttgatagtttttaatattttgttatagatttttttgaatgttttaggttgtttttggtgggttttagtatttgttggttttttgggtattggggattagaaggaatttggtagttggttttaggggtatagttaaaggtaggatgatagttatttttttgtttattttagagtgttgttgtttttttatgttggttgtgtaaagaatatagtttttaaaaaatatgtgttttttgtttatataggtttgaaagtgatgaggaaagtaatgttttgtttattagtgagttttagtttttaaaatgattttaagtgttgttgagatgagaaagtgtggtatntnttnngggggtttttagttttatttgtgtttatggtgtaagtttgtagggataggtttgggatagtattgtttatgttgttagattttttgtagaggattgttgaagttgtttttgt

SEQ ID NO: 521 - DNA, 2244 bp, Artificial Sequence
  Description of Artificial Sequence: Synthetic polynucleotide
  modified_base (113)..(114): a, c, t, g, unknown or other
  modified_base (117)..(117): a, c, t, g, unknown or other
  modified_base (119)..(119): a, c, t, g, unknown or other
atgaaggtagttttagtgattttttgtggaaaatttagtagtgtgggtagtgttgttttgggtttgtttttgtagatttgtattatgggtgtgggtggggttgaggatttttnnggngnatgttatgtttttttattttagtaatgtttgggattattttaaaagttgaaatttgttaataggtgaagtattattttttttattatttttagatttatatgggtagaaggtatgtgttttttaaaagttgtgttttttgtgtgattggtatgagggggtggtagtgttttgagatgagtaggagaatagttgttattttgtttttaattgtatttttaagattagttgttaagttttttttggtttttggtgtttaagaagttggtgggtattaaaatttattagagatagtttgggatatttggggggatttatgataaaatgttaagaattgttagttagtttttagtttattttttgttgttattattattgttttttattggttgttttattttgttttgaattaatagtaaattagagaaaattgtaggagaggatgaaaaataaattaaaggagaaagattatataaatttttaaatttatttaaagtatttggagtttgttgatttgggggaggttttttgtagggaaatttagttttttttatttttttagattaatattgtggggtgattattgattgggaataggaatttattagtagatggtaaaggaaaatgttgttaaagtggaaattttttttttttaagtttgggtgaatttgttgtttgttatattttttagttttgttgggtgttggttgagtgtattttataagttgggtttagtggtgtgaggaaagtttgggggattgggggtggaaatttgagtttgtagttttggaagtgagttgtgtgaggttggtttggaattgtgtgtattttaagatttgtgttatgtaaattattgttattatgaattgtttttttagattgtttgttgattttgaaagatatttttttttatttgatttatgggaagttgtttattttggtttgttatagggtatagtgtgttttttttagtgggggatttggatattttgtttttttgggtttgtggtttgtttttaggggtagtgtagttgttatgtatattgtgtggggtttgtgtgtataaaagtgtgtaattgtgtgttagttgtagtaattattgtatttttttttttagtttgtgtatttgttgtttatataggaggtttttgtgtttttagaataatagagggttgtattttgtagtttggttgttagaggaggtataaagagttgagttggttttagaataatgtaatttgtgtttttatttgtttttttttgtgggttgttagttttttttgtggttgttaggtgtgtataattagtgtttgtttaatgtaaaggtggagtttgtagttggtggtagggatgtattaattaatttgaatttttaattttttagtatttttttttgtgagtgtttagggttttttggagttttggtaaattttggtaaattttagtaaatgttgggattggggtaaggatggttggtgagtaaggtaaagtgttttttattttagtttttttttttatgtttttttaaagtggtgaatgtgatttttttaattttatattttgtttttgttgtaggtagtgatattggagttggtttgagttttttaagtttggttagaaagtttttgtgttaatgttaaggttagagatgggttttaggagtgttgttgtattttggttgttggttttttgtgggggtaaggttgtgtttttagttaatgattaaataagtttgtttatatggtgggtgggagagtagagagtttttttttttttgtagagtaaagttttttaattgtttttgtatagggagattagttagtttggaaaattgaaatgtgttgtttaaaagagatttgaagtgtatggggttttgaataagggtaggttttggtttttgtgggttttggaaagatagggtttttagaggaaaatgtatatttttattttgttttttagtatttgggaagattggaaatagggtaaaggttggtatattgaggggagggtgaatgaaatgggggggggttggttaatgaaagtttagggataaggagagagtaagaaagaaaaagaaaagggagaagggaaagtaggggaagagtggaagagaaagagaaaatggaa

SEQ ID NO: 522 - DNA, 2420 bp, Artificial Sequence
  Description of Artificial Sequence: Synthetic polynucleotide
tttttttttttgggatgagtagggagagtgtgtggaggtttttgatttttttgattataattaagaaagaataatttttaaagtgtttaatatttttgtttttaagttttttaaaatataggggtagggaatattaaaatatttggtttttattaggaagattatggttttgaaaggaaatagtagatatgatattttattttatttggatttatgattaaaaaaataaaaataaaaatttaaagagtttgtttgtattttttttttttaaattttggtttggtttgaaggtagggaatttaaaagattgaggttgatggaagagagttagtggggtgagtgagtgggtagtttttttttttgttttttggagttatttagaaggataggggaagggaaggaagaagaggtgaggaaaaagaggagggagggaagtggaggttaggagtgatggagtaaggaaagtagtttgtaagtgagaaaagagggaaaaaatatagttgtatgaatttagagagattataagttgtatgtaagtagtagtagaaagagtgagagtgtgagtgtgtgttttttttgtggtttggggttagatagtttttagattagtttgaattattttttaagtattgttttgttttttttgttttggttgttttttaatttttttttttttttttttttattttttttttaaaaattaaaataatataagggagggtggtaaaagtttttttaaattggttgatttatttaaagataataataataataataaatatataataatttatattttatggtgggagagatgtgggattaatttttggtatttattttaatatttgatagttagaataaataaatatatatatttatattaatagatatatatagaaaatttggagttaaagtatttggtaagagtggaaaaaaaaagaattaaaaggtaaaataatgattatgagtagtggtggtggtagtggtattagtggtaatagtggtggtggtggtagtagtagtagtagtggtggtagtaatagtaataattatttggtgtttggttttttttagaaattttttgtattattatttttaagaattttagttttaagaattaatagagtttaatttttggaatttgagttttggattttattattgttatgtggtaggggaggatttggtgttagttttttgagatttttattgtttttggttaattaaaagtttttaaagttataagatttttttattggttggtatattttgaggtttttataagtagagtgttttggatttggaggttttggtttgaggtttgaggggtttgaaggtggttttttttttttgggtttaagatgatggtatggtttgttttgttattattatgtgggttttttttttgtgatgttggtgtttttgttgtagtaaagtttggtttttggaattttgagaattaatttgttatttggtgatataagagggggagtgtgttttgtttttttggggtttggggttaatttttttttttttatttataaatttagtagattgagttaaatgtataaaagggagtgagaggtttgaattattgggaaaagtatgttatatatatagtagggttagagaggtgagtaagagaaaaataaaataaaataaatattatagttttttttaattagaatattaggtattatgagaaaaatatttgttaagtagtttttggtgggtttatttgttttatttttatttaggataggggtttttgttgttgttttgggtttttttttttttggtgtggtggtttgggatttttggtttttgtattttgatggtttatggatttttgtttttgattttttgttttttgtaagtttgtggtgttatgtaaattataggattggtattggttggatttttttgtatgtgttttttttttttttatttaattttttaagtgttttaaagatgtattattttaatattaatattattgaaagaagtttaaatttttggttatatgtaataattttagtttttatttttttttttttttttttttttggtgtaatttttttttttttttttggatttttgttgaagtgtgttttttttgtattttagagaaatgtttaaaggatttgttttggtttggtttgtttttttttaggatagtaagtggtgggtttaatttgttattgttgatttttgggaaattttttgttgtaagaaatgtgtgtgtgggggggagggtgggggtggtggggtggtatgtgtgtgttttttataaaattttgtgagttaaatatttgtttgtgttttgtttttttttaaggttttgagatttttgtttttgaggtttgttttaaggttgttgtaaaaaaatttttttagtttgtgtttaagagattagttgg

SEQ ID NO: 523 - DNA, 2420 bp, Artificial Sequence
  Description of Artificial Sequence: Synthetic polynucleotide
ttggttgattttttaaatatagattgaagagatttttttataatgattttgaaatgagttttgaaaataaaaattttaagattttaagagaaaataaaatataaataggtatttggtttatagaattttgtagaaaatatatatatattattttgttatttttatttttttttttatatatatgttttttgtaataagaaattttttaagagttaataataatagattaaatttattatttgttgttttggaaagaaataaattaaattaaaataaattttttgaatatttttttgaagtgtaggagagatatattttagtaaaagtttaagggggaaaaagaaaattgtattaaaggaaaaaaaaaaaaaaaaagtgggggttgggattgttatatatggttaaaaatttaagttttttttaatagtattagtattgaaataatatatttttaaaatgtttgagggattagatagggaaagaaaaggtatgtataaaaaaatttaattgatgttgattttgtgatttatgtaatattataaatttgtaaaaggtaaaaaattagaagtaaaaatttataaattattaaaatatagaaattaaaaattttaagttattatattagaaagaaaaaaatttagaataatagtaaaaatttttgttttaaataaaaataaagtaaatgaatttattgaaaattgtttggtaaatattttttttgtggtgtttaatattttagttggaaagagttgtgatgtttattttattttattttttttttatttgtttttttaattttattatatatataatatattttttttagtggtttaaattttttgtttttttttgtgtatttagtttgatttgttgagtttatgggtaagaaagaaggaattagttttagattttgggaaagtaaagtgtatttttttttttatgttattgaatagtaaattagtttttagaattttagaggttgagttttgttatagtgaaggtgttgatgttatagaggaggagtttatgtgatggtggtggagtaggttatattattgttttgggtttggggagggagagttatttttaggttttttgagttttgaattggaatttttaaatttgagatgttttgtttatgaggattttgaaatatgttggttagtgaaaaaattttgtggttttgagggtttttggttggttaggggtagtaaaaattttggagagttgatattaagtttttttttgttatgtagtagtggtaaagtttgaagtttaaattttgagaattgagttttgttgatttttagaattggggtttttagaagtggtgatgtaagaagtttttaggaaaggttggatattaggtgattattgttgttgttgttgttgttgttgttgttattgttgttgttgttgttgttgttgttggtgttgttgttgttgttgttgtttatgattattattttattttttaattttttttttttttgtttttgttaaatgttttggttttaagttttttatgtgtatttattgatataaatgtatatatttatttattttagttgttaggtgttaaaataaatgttgaagattagttttatgttttttttattataggatatagattgttatgtatttattattattattgttgtttttgagtgaattggttggtttggggaggtttttgttatttttttttgtgttgttttggtttttggaaaggaggtggaggagaggaaggaggggaattagggggtggttggagtagagaggatgagatagtgtttggggggtgatttgggttagtttgggggttgtttggttttagattgtggagaggatgtgtgtttgtgtttttgttttttttgttgttgtttgtgtatggtttgtgatttttttggatttgtgtggttgtgttttttttttttttttttgtttgtaaattgttttttttgttttgttgtttttggtttttgttttttttttttttttttttttttgtttttttttttttttttttttttgtttttttgggtaattttgggaggtaaaaagggaggttgtttgtttgtttgttttgttggtttttttttattggttttggttttttagattttttgtttttgagttgaattgagatttggaaggaaaaaatgtaagtgaattttttgggtttttgtttttgtttttttggttataaatttagatgagatgaagtattgtgtttattatttttttttagagttgtgatttttttaatgagagttgagtgttttggtgttttttgtttttgtgttttggggagtttgggggtggggatgttgaatattttgaaaattatttttttttggttgtagttgagggagttgggaatttttgtgtgttttttttgtttattttgaggagagaga

SEQ ID NO: 524 - DNA, 2344 bp, Artificial Sequence; identical to SEQ ID NO: 502
  Description of Artificial Sequence: Synthetic polynucleotide

SEQ ID NO: 525 - DNA, 2344 bp, Artificial Sequence; identical to SEQ ID NO: 503
  Description of Artificial Sequence: Synthetic polynucleotide

SEQ ID NO: 526 - DNA, 2366 bp, Artificial Sequence
  Description of Artificial Sequence: Synthetic polynucleotide
tttttttttttttttggtagaattgtttgatggttttgattatgtttaggtttattttgatgtagtagtaggtatggttggtttggggtttgggatagtttgttatgtagtagtaatagttttttagggtgttgatttttttatatttggtttttttatataggtggttgaagtgattgaatagattgtttaggagatttattagggtgtgggtagatttgttggtatttattttggtgaagtttatgatatttgtaaataaaatattgatttttttgatttgttgtattttaaaagggtggaaggttataggagttttttggatggaagattttttttttttgtttttggggtttgaggtggtatgttttttgatagaatttttattttttttatttttttgttttattaagttattggttatgatttttggtattatggaatgaattattttttttttgagggttttttttatttttaggttttttttgtgtataatggattgttttattttgaggaaggtgtttttggattttatttgggatatgatgaataggtggattttgatggtgtggatgtagttgtggagtagttttttgtttagtagtttttagtgtagggttttggttttgggtgaggggaagtaggttttattttggaaatggtagttaaaggttttgaaaaggatagagtaggttatttttagatataaatttaggtataaaggtaagtgtatgatggtatagagtaaaaagagtattttgatgtatatggagaagttttttatttgagataagtaagtatttgtgggttgggttgtggttgtaaggttggagttgttgttgtgttttgagataggtgttaagatttggaattgtgtagttagggttagggtgaatattagtagggtgagagttagtgaggtttatgtgtaatgttgggtgtatagtttggtgaaggtaaatagaaagaagtttatatatattaggaggaagtatagtgtgggggtgattatgatgattagtttggattttatgtggattgtaaaatagatgttttatagaaggtaggtgaagttgatgtagaagagtgtatattggaattggtgttgggtttgtgggaagtagtgttttaggtaggttttttttaggtttattgagttgaatttggggttttattagtggttggaggtttttttgaatagttggggtagttttttttgtttgtgtagttggtttttgttgtttatttgttgggggatgtttttggagtttttagagttgttgtagttagaggagatgttgtatttgtagtgtttggggtggttgttggaggatagttgtttggggttgattttgatgtgtatgttgttgttgtttttgttggagttgtagtttattttggtgttgtggtgatgtagtagttgttggtggggtggggaagttatgttgttgagttttggggtttgttttggttggggttattagtatttgttagtaaaatggggagagttagtggtgtttttatttaggtatgtatgtttagaggtttgggatttgtttttgttttaaggggtggttttagtatgtgatttggataggtattatttgtttttgtggtttttggtttagtggtgtttttattgtttttattgtttttatttttgaggtgtatgagaattgtttgggatggatttagaatgtttgggggtttttgttgtgtggttgttgtggttttgggattgttttgtttgtttgttttttgtgttttttgttttgagggtggtttttgtgttgtgtggttttttttttttgtgtgtttgttttttttagttgtggttttggagggaagtttagattttgagtgtttttagttttgtgagttgtttgtgtataaataattttgttggtggtgtggagttttttattttgtaggagttgtgttttgatgtgttaaaggtggtgtgtggttggttttgggtttggattttgatttggagtagtgagttttggtgggtgtttttggtttgtgttttttggttgttttttgtgttttgggttggttttgtttgtggtggtgggtgttgggggtgggggtgttttgggttgtgagtgtgtggagtttgttggtgtggtttgtttagtggggtttgtttttttttgagtgtgttgttgtttttgttgtggttgtagttgttttgggattgagtgtgtggaattatggatgtgggttttttgttgggtggtggtgtagatgttgttgtagagttgggtttttgtgatgttggttgggatgtttgtttgtttgtgtttatgttgggggttgtttttttgagttagagatgtggttgttgttgtgtttgttgt

SEQ ID NO: 527 - DNA, 2366 bp, Artificial Sequence
  Description of Artificial Sequence: Synthetic polynucleotide
gtggtgggtgtggtggtggttgtatttttagtttggggaggtggtttttggtgtgggtgtgggtgggtgggtgttttggttggtgttgtgggagtttggttttgtggtagtgtttgtattgttgtttggtgaggggtttgtgtttgtggttttatgtgtttggttttgggatagttgtggttgtggtgggagtggtggtgtatttggggggaagtaggttttattagatgggttgtgttgatgggttttgtgtatttgtagtttggggtgtttttatttttagtgtttgttgttgtgggtagggttggtttggagtgtggggggtggttggggagtgtgagttgggggtgtttgttgaagtttgttgttttgggttggggtttgggtttggggttggttgtgtgttgtttttgatgtattggagtgtggtttttgtaggatggagggttttgtgttgttagtggagttgtttgtgtgtaggtggtttgtggggttgggagtgtttaaggtttgaatttttttttggagttgtagttggaggaggtgagtgtgtgaggaggagaagttgtgtggtgtggaggttatttttggggtgagaggtgtggaaggtgagtgagtaaagtggttttggagttatggtggttatgtggtggggatttttgggtgttttaggtttgttttgagtggtttttgtgtgttttgaaggtgggggtggtgggggtggtgggagtattgttgagttgggaattataggaatagatggtgtttgtttaggttgtgtgttggagttgttttttaggataggagtaggttttgggtttttaggtgtgtatgtttaggtgggagtgttgttaattttttttgttttgttggtaggtattggtgattttggttggggtaggttttgggatttgataatatggtttttttattttattagtagttgttgtattattatagtattgaggtgagttgtgattttagtggggatagtaatagtgtgtgtgttaagattaattttaagtagttgttttttaatagttattttaagtattgtaaatatagtattttttttagttgtagtagttttggggattttgggggtgttttttggtgagtgggtggtggaggttggttgtgtaggtagaagaagttgttttagttgtttgagagggtttttagttgttggtgggattttaagtttgatttggtgaatttggaggaggtttgtttggagtgttgttttttgtagatttagtgttggttttggtatgtgtttttttatattggttttgtttgttttttgtggagtatttattttgtggtttatatgagatttagattgattgttatggttgtttttgtgttgtgtttttttttggtgtgtgtgggtttttttttgtttatttttattaagttgtatgtttggtattatgtgtggattttgttggtttttattttgttggtgtttgttttgattttggttgtgtagttttaggttttgatgtttgttttaggatgtggtgatagttttaattttatggttatagtttggtttatagatatttgtttattttaagtggggagtttttttatgtgtattgaagtgttttttttgttttatattgttatgtatttatttttgtatttgagtttgtgtttgggggtggtttattttgttttttttgagatttttggttattatttttgggatgaagtttgtttttttttgtttggagttggggttttgtattgggagttgttgagtagggggttgttttatggttgtatttatgttattggggtttatttgtttgttatgttttaggtgaggtttaggagtattttttttaaggtggggtaatttattatgtatgggaaggatttggaagtggaaaaagtttttaaagagaggatgatttattttgtgatgttaagaattatagttgatgatttaatgaagtagggagatgaggagagtgagaattttgttaagaggtatgttattttgagttttaagaataggaagaaaaagttttttatttaaaaagtttttatagttttttgtttttttaagatgtagtagattgaagaagttagtattttatttgtagatattgtgggttttattaagatgagtgttaataagtttgtttatgttttggtgggttttttgaatgatttgtttggttgttttgattgtttgtgtgaggagattaagtgtgagaaaattagtattttgggagattgttattattgtgtggtgggttgttttgagttttgggttgattatgtttattgttgtattgagatgggtttgggtatgattaaggttattgagtagttttgttaggagaagaaggaga

SEQ ID NO: 528 - DNA, 2264 bp, Artificial Sequence; identical to SEQ ID NO: 456
  Description of Artificial Sequence: Synthetic polynucleotide

SEQ ID NO: 529 - DNA, 2264 bp, Artificial Sequence; identical to SEQ ID NO: 457
  Description of Artificial Sequence: Synthetic polynucleotide

SEQ ID NO: 530 - DNA, 1334 bp, Artificial Sequence
  Description of Artificial Sequence: Synthetic polynucleotide
gggtgttttgattttttttttattttgtttttttgggttttatttgtttgtttttggatttttgtttttttttgttttttggttttttagagttttttttttatggtagtagttttttgtgtttttggtgtagttttttagtggatgatttttttgttttggggttgagtttagtttttggatgttgttgaaatttttgagattatgtgtgggtttggttgttgtttttttgttgggtgttattgttattgttgttgtttttgttgttgttgtttgtgggatgtttagtagtttgttgtttggtttttgtgattttgtgttttttggaagttgtttgttgttgtagagttgtatgaattagttatggtgttgtgggagtttttgtggtagtgtagtagttggatattttgtgagggtttttgttggttgttgttgttgtttgttatgttatttattgtagtttgtttggtgaagtttgttgttttttttatttttttaagtgattgttaaatgtttattggttggaattgttttggtaagtttagaatttttgtttttgattttttaattttgtagaagaatatgtgtatttagtatagattagtttattttagtgtgtttttttagttttttattttttattgttttagatttttaatattatttatttttatttagagaaataaggggaattgttgtaggtttgggggtgaggggtggttttgggatgggtagaaagtgtaggtgtagtaggaaatttttgtatgtttgtgtttatattggagttgtgaggattttgagaaatattaaatgggatggttttttgggtttattgttttgaaagagtattaattttaggggaaatattgaaatagaagttttgttattattaaagaaaaaagttttattaggatgaggaagaaataattttatgagaaagaatgagtgagaaagtaataaattaaatggtgattgtaggggaattgttgatttttggtaaaggtgttatgaggttgtattggttttttgttgaagattaggttatatagattttagaggagttgggttttaatagaatttttttttttttttttttttttttttttttttattttttttttttttttattttttttttttttaggtggtaaaagatattggttttgtagtttagatatgtttttttttttgtttttttaagttttaaggtagtataggggagttgagaaaaagaatattttgtgggttttttaggttggagtgggtatgattgaggttggttaggttttatgtaggtgagttgagggtggaatttgattttagtgggtgttgat

SEQ ID NO: 531 - DNA, 1334 bp, Artificial Sequence
  Description of Artificial Sequence: Synthetic polynucleotide
gttagtgtttattgaagttgggttttgtttttggtttgtttatatggagtttgattagttttagttatgtttattttggtttgggagatttgtaaagtgtttttttttttaatttttttgtattattttgaagtttagggaagtaaagagaggggtatatttggattgtaaaattaatgttttttgttgtttaggagagaagggaatgagagagagagagagatagagagagagagagagagagagagagagagaaattttattgaaatttagtttttttagaatttgtgtgatttggtttttaatgggagattagtgtgattttatggtatttttgttaggaattagtgatttttttgtagttattatttgatttattgtttttttgtttatttttttttataaagttattttttttttattttagtaagatttttttttttaatgatgataaagtttttgttttagtgttttttttaggattggtgtttttttaaaatagtgaatttagaaaattattttgtttaatattttttaaaatttttgtagttttaatgtaagtgtaagtatgtaaaggttttttgttatatttgtattttttgtttattttagaattattttttatttttgggtttgtaatagttttttttgtttttttggatagaggtgggtggtattaggggtttagggtagtaggaggtgaggggttgaggaggtgtgttagggtaggttggtttgtgttggatatgtgtgtttttttgtggagttaaagggttggggatgggggttttggatttattagagtaattttagttggtgggtgtttggtagttatttaaggaggtagggaaagtagtgagttttattgggtgggttatgatgagtagtatgatgggtagtagtagtagttagtaaaagtttttgtaaagtgtttagttgttgtattgttgtggggatttttatagtattatgattagtttgtgtaattttgtagtagtaaatggtttttgaggaatataggattgtgggggttgggtagtgggttattgagtattttgtggatggtggtagtagaggtggtggtggtggtagtggtatttggtggggaagtagtagttaaatttgtgtatgattttgagagttttagtaatatttagggattgggtttagttttggagtgagagggttgtttgttgagaagttgtgttggagatgtgggaagttgttgttataaggagggagttttgggaagttggaggataggaggagatgggagtttaggggtagatgagtggagtttgaggaggtagggtggagggagagttaaggtgttt

SEQ ID NO: 532 - DNA, 2501 bp, Artificial Sequence
  Description of Artificial Sequence: Synthetic polynucleotide
tttttgaaaattgttaataaaaatttgttggttttatggtttagggggtattatggaatttgtggatatgtgatgttttttttggatatttggttttaaaatgttttttttttgtattttttttttttattttttaggttagttgatatttagggaaaataggaaaggatttatgtgaaatattgggggttgaattttttttgataataagttttttaaaaaagatttttaaatgaaatttttttgttttttaatttttatttttgttttgggggtatatgtgaaggtttgttatataagtaaatttgtgtttttggtgtttgttgtatagaatattttattatttaggtattatgttgagtatttaatagtttttttttttgtttttttttttttttttattttgtattttggagttaattatagtgtttgttgtttttttgtttgtgttataagtttttattatttagtttttatttataagtgagaatatttagtatttggatttttgtttttgtattagtttgttaaggataatagtttttagttttatttatgttttataaaagatatgatttagttttttttaatggttgtattaaatgaagttttaaagatataatataaatattaattttttttttattataaaaattttttgttgaatttgattatatttaaattaatgagttttgttttatgaaagattttttggataaatttgatagttgatggaataggagaagttgtttgttatgtttaaagttaataagagattaatatttagaataaatggagatttgtaaattaatagaaagtaggtagtaaagttaaagaaaatagtttaaggtatagttattaaaaggaatgtgattatgttttttgtagggatatgggtggagttggaagttgttagttttagtaaatttatataggaatagaaaattagtgagattgtatggttttatttataagtgggagttgaataatgagaatatatggttatatggtggtgattaatatatattggtgtttgttgagtggggtgttggggagggagagtattaggaagaatagttaagggatattgggtttaatatttgggtgatgggatgatttgtatagtaaattattatggtgtatatatttatgtaataaatttgtatattttttatatgtattttagaattttaaataaaagttggatggttaggtgtggtggtttatgtttgtaattttagtatttttgggaagttgaggtgtgtagattatttaaggttaggagtttgagattagtttggttaatatggtgaaattttgtttttattaaaaatataaaaattagttagatgtggtatgttatttataattttatttatttgggaggttgaagtagaattgtttgaatttgagagtggaggttgtagtgagttgttgagattgtgttattgtattttagtttgggttatagtgtgagattatgttataaaataaaataaaataatataaaataaaataaaataaaataaaataaaataaaataaaataaaataaaataaaaaaataaaataaaataaaataaaataaaataaagtaatttttttttttttaagtggtttttattttttttttttgttttgtgaagtgggtgtgtaagttttgggattgtagtggttttagggaatttttttttgtgatgttttggtgtgttagtttgttgtgtatattttgttgtggttttttttttgttgtttgtttattttttaggttttgttgggatttgggaaagagggaaaggtttttttggttagttgtgtggtgattttggggattttagggtgtttttttgtggttgatgtttggggtgtagtggttgttggggttggggttggtgggagtttgtgggattttttagaagagtggttggtgttgtgatttagtattggggtggagtggggtgggattatttttataaggtttggaggttgtgaggttttgttggagttttgttgttgtagtttttgttattagtgagtatgtgtggtttgtgtttttggggatggggtttagagtttttagtatggggttaatttgtagtattaggtttgggtttttggtaggttttttgtttattttgagatttgggatgggggtttaggggatttaggatgtttttagtgttgttagtggtttttagggggtttggagtgttttggggagggatgggattttgggggtggggagggggggtagattgtgtttattgtgttttggtatttttttttgggttttagtaaatttttttttgtttgttgtagtgttgttttatattgtggtttattttttagtttgaggtaggagtatgtgtttggtagggaagggaggtaggggttggggttgtagtttatagttttttgtttatttggagagatttgaatttttttatttttttgttgtgtggtttttattttgggttttttttttgttttttgttttttttg

SEQ ID NO: 533 - DNA, 2501 bp, Artificial Sequence
  Description of Artificial Sequence: Synthetic polynucleotide
tgggagaggtggggaataggaaggaggtttggggtaaaagttatatgatggagggataagggggtttggatttttttgggtgggtgaggggttgtgggttgtagttttagtttttgttttttttttttgttagatatatgtttttattttgaattgggaaatagattatggtgtagggtggtattgtagtgaataaagaaaagtttgttggagtttgggggaggatgttaaggtgtggtgagtgtagtttgttttttttttttgtttttggggttttatttttttttgaggtgttttgggttttttgaaagttgttaatggtattggggatgttttgggttttttaggtttttgttttgggttttgaggtgggtgaggagtttgttgggagtttgggtttgatgttgtgggttggttttatgttgggagttttgagttttatttttggggatgtgggttgtgtgtatttattggtggtgaagattgtggtggtgaaattttagtgaagttttgtggtttttgagttttataagggtggttttgttttgttttgttttagtgttgagttatggtgttggttgtttttttggagggttttgtggatttttgttggttttagttttggtggttgttgtattttgggtgttggttgtagaggggtgttttggagtttttggagttgttgtgtagttggttggggaagttttttttttttttttaggttttagtggggtttagggagtaaatagatagtaggaagaggattgtagtgaagtgtgtgtagtgaattggtgtgttgggatattgtggggggaaattttttaagattgttgtgattttggagtttgtatatttgttttatagggtaggggagaggggtggaggttgtttagaggaaaggaaattgttttattttattttattttattttattttatttttttattttattttattttattttattttattttattttattttattttattttgtgttattttattttattttatgatgtagttttatgttgtggtttaggttggagtgtagtggtgtgattttggtggtttattgtaatttttgtttttgggtttaagtaattttgttttagttttttgagtaggtggaattataggtggtgtgttatatttggttgatttttgtatttttagtagagatggggttttattatgttggttgggttggttttgaatttttgattttaggtgatttgtatgttttggttttttaagagtgttgggattataggtgtgagttattatgtttggttgtttaatttttatttgaagttttggggtatatgtagaggatgtgtaggtttgttatataggtgtgtgtgttatgatggtttgttgtatagattattttattatttaggtattaagtttagtattttttagttattttttttggtattttttttttttagtattttgtttaataggtattagtgtgtgttgattgttgttatgtgattatgtgtttttattgtttagtttttatttataagtgagattatgtggttttgttggttttttgtttttgtgtgagtttgttgaggttaatggtttttagttttatttatgtttttgtaaaggatatgattatgttttttttagtggttgtgttttaggttattttttttggttttgttgtttattttttgttgatttgtagatttttatttattttagatattgattttttgttggttttagatatgatagatagttttttttattttattaattgttaagtttgtttaaggagttttttatgaaataaaatttgttaatttaagtgtaattaaatttagtaagggatttttgtggtggggaagaggttggtgtttatgttgtatttttaaaattttatttaatgtagttattaaaaagaattagattatgttttttgtgggatatggatggagttagaggttattatttttagtaaattaatgtaggaatagaaatttaaatattggatgtttttatttgtaagtgggagttaaatgatgagaatttataatataaataaggaaataatagatattgtggttgattttagggtgtaggatgggaggaaggagaggagtagaaaagagaattattgggtatttggtataatatttgggtgatgaaatattttgtataataaatattgaagatatgagtttatttatgtaataaatttttatatgtatttttaaaatagaaataaaagttaaaaaataaagaaattttatttaaaagttttttttaagagatttattattgggggaaatttagtttttaatattttatgtgggtttttttttattttttttaagtgttggttggtttgagaaataaagggaaagagtataaaagagagatattttaaagttgggtgtttaggggagatattatatgtttgtaggttttgtgatgttttttgagttgtaaaattagtgagtttttattagtaatttttaaaga

SEQ ID NO: 534 - DNA, 2327 bp, Artificial Sequence
  Description of Artificial Sequence: Synthetic polynucleotide
ttttttattttttttattgttatttttgtttttgggttattgtttttttttgtaagttttgtttgttggattttgttgtttttgtgtggttgttttattatttatgtttgattggaggaaataaaattggtgttggttttttaattttaagttttgtgtttgattgggggaggggttatttaggtatttttttttttaaatagaagaaatttaggtattaattgtaaatattttgttgttttttttgaaagtatgtattatattagttgaggttttggagatatatggtttattatttatttttagtttttaggtaaagaattttatggagatttattagtaaaattagattttttaagggaaattattaggatgtttttagattttttttaagggatattattggttgttgattatatttgagtatatttttttttagtttatttttattattttattttgggattattttaaggaaattagttatttgtagaaagtttgaaattttgaaaggagaggtataatttagggtaaaagagattgagtgaagttttttagattgattgtttttattggggttattttttataaggttgggagtggagaggagtgtttgtagaagagagattatttttaaaggggtttttttgaatttaggaggtgagggggattttttagagttgttattatttgtaggtggatttgttattattatgtagtgttttttggggagttagtttgttttttttagagttttttttaggtattgttttagagtttaggggagtttttagtgttttttttgtttgttttgagggtattgtatgtataaaagtttttttatgtgtgtgtgtatatatagatatttagtgggtttggagtgtatttttgtttatttgttattatgtggtaaattttagatttggaagttattattatgtgggtgtgtattaggatttaggggagattgtgtggggttgggattgtgtataaatataggggttgtatggaagttttgtatattttaaagtgtaatttgagtttttgtggttttagttttatttaaaatatgtaaatttttgaaattgaaaaatttgaaaaatttttgaagagttttatttgaataaatttaaatttattgggagttgttttgaggagataaaatgtatagtgatttggggtgagggatatttgtggggaggtaggatgtgttggattgggtttttagggttaaggtgtttttgggtttttgatgatagttttagtgtagagtagggaagtggtattgttaggtagtaagtttagttgttttatttttgtgatttatgagttagttttgaggttttggttttagggtttagtttttatttatgttgtgtttttgagagtttaatattgtgtttggtatatggtaggtgtttattgaatagttgtggtatgaatgaatgaatgaatgaatgaatgaatgaatgaatgaatataagtttaatgggggaaatttgggttttttaataaaggtaggggttgggggatatttaggggtttttttaggaggatttttttttttattattttatttttgggagaaaggtttatgtaggatggttgttttttttttgttgagagttttgtttttagtttatttgggttgttggaaaagaggagaagaataaataagagataagtaattatttttttattggtgttttgtttttgtttttattgttaaatttattttaaagttgaggatggtgagattgtgaagttgtaaagaaatatagagtttatttttttaaagaattatgatatatttaaagtttgttttttttaggtttttttttttggtttttgtttttttttttttttggttttttgtttttgattgaattttatgggatagagaattttttgttttttatgaggtaaggtgtgaatttgtagagatttggggtgttttttggttttttgtgttgttttggaggtgtttatagaggtttttgttgttaaggatagtaattgttttatttttgatggttgtttgttaggtttgtgggttgtgggtttatttagttgttgaattttttagttgttattagtgttgtttttaatttaatggaataatgtaaattatagtttgtttagttgatatgtttttgtgaatgtgttggggttgagttttggttagttgtttttttgatgttttggatggttggagggaatgaagttttgaattgtgataaaagtggggggggggtattttaaatttttaaagtaatgtttttttttttttttttttttttaagtaattgagttttattaaatgttgg

SEQ ID NO: 535 - DNA, 2327 bp, Artificial Sequence
  Description of Artificial Sequence: Synthetic polynucleotide
ttgatatttggtaaggtttaattgtttaagaaaaaagaaaaaaaaaagaatattgttttgagaatttggggtgttttttttttatttttgttataatttagagttttattttttttggttgtttaggatgttgagagagtggttggttagagtttagttttggtgtatttgtagggatgtgttagttgggtaggttataatttgtattattttattaagttaggagtagtgttgataatgattggaaagtttgatggttgggtgggtttgtgatttgtaggtttggtgagtaattattgaaaataaaataattgttgtttttggtggtaaaggtttttatggatgtttttagggtagtgtagggaattaaagggtattttagatttttgtgggtttgtgttttgttttgtgggggataggaggttttttgttttatgaggtttagttaaggataaggagttgggaggggaaaggggtaggagttaaggagagaaatttgaaagaggtaaattttaaatatattgtaattttttaagggggtgggttttgtgtttttttgtaattttatagttttattatttttggttttggagtggatttggtagtgaggataaggatggaatgttggtaggggagtagttgtttgttttttgtttatttttttttttttttttagtggtttagataggttgaaggtaaaatttttagtaagggggaagtgattattttgtgtggattttttttttaggggtgggatgatgaaaaaagaaatttttttggggaagtttttaggtattttttagtttttatttttattaggaggtttgggttttttttattaaatttatatttatttatttatttatttatttatttgtttatttatttatattatgattatttagtgagtatttattatgtgttagatatagtattagatttttaaaaatgtggtataaatggaaattaggttttgaagttagagttttaggattggtttatgggttataaaagtagagtaattgagtttgttgtttagtggtgttatttttttgttttgtgttaaggttattgttgaaggtttagagatattttgattttggaaatttaatttagtatgttttgtttttttataaatattttttattttaaattgttgtgtgttttgtttttttaaagtgatttttaatggatttggatttatttagatagaattttttggaagttttttagattttttaattttaagaatttgtatgttttaagtgaagttgaaattgtgaaggtttaggttatattttaaaatatgtaaggtttttgtgtggtttttgtgtttgtgtgtagttttaattttatatagttttttttggattttgatgtgtgtttgtatagtgatgatttttaaatttggggtttattatgtggtgataaataaataggggtatattttaaatttgttggatgtttatgtgtgtgtgtgtgtgtgaaggagtttttgtatatgtaatatttttagggtaaatggagaaagtgttaaaggtttttttgaattttgggatagtatttgagggggattttggggagaataggttggttttttaggagatattatatagtgatgataaatttatttataggtggtgataattttaggaagttttttttattttttgagtttgggagagtttttttaaaggtagttttttttttgtagatatttttttttatttttgattttatgaaaagtggttttagtggagataattaatttgaaaagttttatttggttttttttattttaggttgtgtttttttttttgggattttaagttttttgtaaatggttaatttttttagggtgattttaaaataaaatggtaggggtgggttagagaagagtgtgtttaagtgtaattgataattagtaatattttttgaagagagtttgaagatgttttggtaattttttttaagaaatttggttttattggtggatttttatagaattttttgtttagaggttggaaatgagtaataggttgtgtgtttttaaggttttggttaatatgatatatatttttaagaagagtaatggggtgtttataattagtatttaaattttttttgtttgaaaaaaaaaatatttaaataattttttttttaattaagtatgaagtttggaattaaaaagttaatgttaattttattttttttagttaagtgtgagtgatggggtggttgtgtaagggtaatggagtttagtggataaagtttgtagagaggggtagtggtttggaggtaagggtggtggtggggggggtgggggg

SEQ ID NO: 536 - DNA, 24 bp, Artificial Sequence
  Description of Artificial Sequence: Synthetic oligonucleotide
ttggagttaaagtatttggtaaga

SEQ ID NO: 537 - DNA, 18 bp, Artificial Sequence
  Description of Artificial Sequence: Synthetic oligonucleotide
aaaaccaccttcaaaccc

SEQ ID NO: 538 - DNA, 22 bp, Artificial Sequence
  Description of Artificial Sequence: Synthetic oligonucleotide
atcctccacactcttcctctat

SEQ ID NO: 539 - DNA, 22 bp, Artificial Sequence
  Description of Artificial Sequence: Synthetic oligonucleotide
gaaattaggtttggttttgttt

SEQ ID NO: 540 - DNA, 19 bp, Artificial Sequence
  Description of Artificial Sequence: Synthetic oligonucleotide
gagattttgggaggggtag

SEQ ID NO: 541 - DNA, 22 bp, Artificial Sequence
  Description of Artificial Sequence: Synthetic oligonucleotide
aactctatccttttccctcttc

SEQ ID NO: 542 - DNA, 20 bp, Artificial Sequence
  Description of Artificial Sequence: Synthetic oligonucleotide
tgttggttgttgttgttgtt

SEQ ID NO: 543 - DNA, 19 bp, Artificial Sequence
  Description of Artificial Sequence: Synthetic oligonucleotide
ctttctacccatcccaaaa

SEQ ID NO: 544 - DNA, 22 bp, Artificial Sequence
  Description of Artificial Sequence: Synthetic oligonucleotide
taagtgataaaggaaggaagga

SEQ ID NO: 545 - DNA, 18 bp, Artificial Sequence
  Description of Artificial Sequence: Synthetic oligonucleotide
ccttcaaaccccaaacaa

SEQ ID NO: 546 - DNA, 22 bp, Artificial Sequence
  Description of Artificial Sequence: Synthetic oligonucleotide
ttgttgtttttaggggttttgg

SEQ ID NO: 547 - DNA, 22 bp, Artificial Sequence
  Description of Artificial Sequence: Synthetic oligonucleotide
tccttcccattctccaaatatc

SEQ ID NO: 548 - DNA, 22 bp, Artificial Sequence
  Description of Artificial Sequence: Synthetic oligonucleotide
tcaactaccatcaacttcctta

SEQ ID NO: 549 - DNA, 25 bp, Artificial Sequence
  Description of Artificial Sequence: Synthetic oligonucleotide
aatttatttttagtgttgtagtggg

SEQ ID NO: 550 - DNA, 21 bp, Artificial Sequence
  Description of Artificial Sequence: Synthetic oligonucleotide
gaaaggagaggttaaaggttg

SEQ ID NO: 551 - DNA, 21 bp, Artificial Sequence
  Description of Artificial Sequence: Synthetic oligonucleotide
aactcacttaactccaatccc

SEQ ID NO: 552 - DNA, 22 bp, Artificial Sequence
  Description of Artificial Sequence: Synthetic oligonucleotide
ggataggagttgggattaagat

SEQ ID NO: 553 - DNA, 22 bp, Artificial Sequence
  Description of Artificial Sequence: Synthetic oligonucleotide
aaatctttttcaacaccaaaat

SEQ ID NO: 554 - DNA, 23 bp, Artificial Sequence
  Description of Artificial Sequence: Synthetic oligonucleotide
tccaataaacacaaacctaaatc

SEQ ID NO: 555 - DNA, 22 bp, Artificial Sequence
  Description of Artificial Sequence: Synthetic oligonucleotide
atatgggattgatggaagatag

SEQ ID NO: 556 - DNA, 21 bp, Artificial Sequence
  Description of Artificial Sequence: Synthetic oligonucleotide
ggaagaggtgattaaatggat

SEQ ID NO: 557 - DNA, 19 bp, Artificial Sequence
  Description of Artificial Sequence: Synthetic oligonucleotide
cccaaaaatcaaacaacaa

SEQ ID NO: 558 - DNA, 19 bp, Artificial Sequence
  Description of Artificial Sequence: Synthetic oligonucleotide
atttgggaaagagggaaag

SEQ ID NO: 559 - DNA, 21 bp, Artificial Sequence
  Description of Artificial Sequence: Synthetic oligonucleotide
taaaaactctaaaccccatcc

SEQ ID NO: 560 - DNA, 19 bp, Artificial Sequence
  Description of Artificial Sequence: Synthetic oligonucleotide
ccctacccaccaatatacc

SEQ ID NO: 561 - DNA, 21 bp, Artificial Sequence
  Description of Artificial Sequence: Synthetic oligonucleotide
agatttggggaagaagttgta

SEQ ID NO: 562 - DNA, 22 bp, Artificial Sequence
  Description of Artificial Sequence: Synthetic oligonucleotide
taaaagaaggatttttgattgg

SEQ ID NO: 563 - DNA, 21 bp, Artificial Sequence
  Description of Artificial Sequence: Synthetic oligonucleotide
catcttatttacctccctccc

SEQ ID NO: 564 - DNA, 22 bp, Artificial Sequence
  Description of Artificial Sequence: Synthetic oligonucleotide
ttttagattgaggttttagggt

SEQ ID NO: 565 - DNA, 22 bp, Artificial Sequence
  Description of Artificial Sequence: Synthetic oligonucleotide
atccattctacctcctttttct

SEQ ID NO: 566 - DNA, 22 bp, Artificial Sequence
  Description of Artificial Sequence: Synthetic oligonucleotide
gtaatttgaagaaagttgaggg

SEQ ID NO: 567 - DNA, 22 bp, Artificial Sequence
  Description of Artificial Sequence: Synthetic oligonucleotide
ccaacaactaaacaaaacctct

SEQ ID NO: 568 - DNA, 24 bp, Artificial Sequence
  Description of Artificial Sequence: Synthetic oligonucleotide
agtaaatagtgggtgagttatgaa

SEQ ID NO: 569 - DNA, 25 bp, Artificial Sequence
  Description of Artificial Sequence: Synthetic oligonucleotide
gaaaaacctctaaaaactactctcc

SEQ ID NO: 570 - DNA, 22 bp, Artificial Sequence
  Description of Artificial Sequence: Synthetic oligonucleotide
gttagtatgtttgggggtaaat

SEQ ID NO: 571 - DNA, 22 bp, Artificial Sequence
  Description of Artificial Sequence: Synthetic oligonucleotide
ataaataacaccttccacccta

SEQ ID NO: 572 - DNA, 22 bp, Artificial Sequence
  Description of Artificial Sequence: Synthetic oligonucleotide
tttgtattaggttggaagtggt

SEQ ID NO: 573 - DNA, 22 bp, Artificial Sequence
  Description of Artificial Sequence: Synthetic oligonucleotide
cccaaataaatcaacaacaaca

SEQ ID NO: 574 - DNA, 21 bp, Artificial Sequence
  Description of Artificial Sequence: Synthetic oligonucleotide
ttgtttgggttaataaatgga

SEQ ID NO: 575 - DNA, 20 bp, Artificial Sequence
  Description of Artificial Sequence: Synthetic oligonucleotide
cttctctcttctcccctctc

SEQ ID NO: 576 - DNA, 22 bp, Artificial Sequence
  Description of Artificial Sequence: Synthetic oligonucleotide
aatatagggaggtttagggttt

SEQ ID NO: 577 - DNA, 22 bp, Artificial Sequence
  Description of Artificial Sequence: Synthetic oligonucleotide
taaccatacatttctcatccaa

SEQ ID NO: 578 - DNA, 20 bp, Artificial Sequence
  Description of Artificial Sequence: Synthetic oligonucleotide
ttttggggaatatagggttt

SEQ ID NO: 579 - DNA, 23 bp, Artificial Sequence
  Description of Artificial Sequence: Synthetic oligonucleotide
ttctcacatttctaaccacttct

SEQ ID NO: 580 - DNA, 19 bp, Artificial Sequence
  Description of Artificial Sequence: Synthetic oligonucleotide
ctcctccttccaacaaaaa

SEQ ID NO: 581 - DNA, 22 bp, Artificial Sequence
  Description of Artificial Sequence: Synthetic oligonucleotide
gtttagaggttttgggatgatt

SEQ ID NO: 582 - DNA, 25 bp, Artificial Sequence
  Description of Artificial Sequence: Synthetic oligonucleotide
tgaatagggtgatattttagttagg

SEQ ID NO: 583 - DNA, 22 bp, Artificial Sequence
  Description of Artificial Sequence: Synthetic oligonucleotide
ataaatcatcccaaaacctcta

SEQ ID NO: 584 - DNA, 22 bp, Artificial Sequence
  Description of Artificial Sequence: Synthetic oligonucleotide
atttggttattggttgaaggta

SEQ ID NO: 585 - DNA, 24 bp, Artificial Sequence
  Description of Artificial Sequence: Synthetic oligonucleotide
aatttttaatttctcaacacctct

SEQ ID NO: 586 - DNA, 23 bp, Artificial Sequence
  Description of Artificial Sequence: Synthetic oligonucleotide
gaagaggtgttgagaaattaaaa

SEQ ID NO: 587 - DNA, 21 bp, Artificial Sequence
  Description of Artificial Sequence: Synthetic oligonucleotide
cccaccctaacttaccataaa

SEQ ID NO: 588 - DNA, 22 bp, Artificial Sequence
  Description of Artificial Sequence: Synthetic oligonucleotide
caattccccttatttctctaaa

SEQ ID NO: 589 - DNA, 22 bp, Artificial Sequence
  Description of Artificial Sequence: Synthetic oligonucleotide
aattagttatggtgttgtggga

SEQ ID NO: 590 - DNA, 22 bp, Artificial Sequence
  Description of Artificial Sequence: Synthetic oligonucleotide
ttctattaaaacccaactcctc

SEQ ID NO: 591 - DNA, 22 bp, Artificial Sequence
  Description of Artificial Sequence: Synthetic oligonucleotide
ataaggggaattgttgtaggtt

SEQ ID NO: 592 - DNA, 22 bp, Artificial Sequence
  Description of Artificial Sequence: Synthetic oligonucleotide
taccattctttcctaaacatcc

SEQ ID NO: 593 - DNA, 18 bp, Artificial Sequence
  Description of Artificial Sequence: Synthetic oligonucleotide
gggttggtggagaggtag

SEQ ID NO: 594 - DNA, 21 bp, Artificial Sequence
  Description of Artificial Sequence: Synthetic oligonucleotide
gaagatgagaggaggttgaga

SEQ ID NO: 595 - DNA, 21 bp, Artificial Sequence
  Description of Artificial Sequence: Synthetic oligonucleotide
ccacaccacctactacaaaat

SEQ ID NO: 596 - DNA, 20 bp, Artificial Sequence
  Description of Artificial Sequence: Synthetic oligonucleotide
aacaaacctcctccaaattc

SEQ ID NO: 597 - DNA, 21 bp, Artificial Sequence
  Description of Artificial Sequence: Synthetic oligonucleotide
tgttggtaggtattggtgatt

SEQ ID NO: 598 - DNA, 22 bp, Artificial Sequence
  Description of Artificial Sequence: Synthetic oligonucleotide
tccccacttaaaataaacaaat

SEQ ID NO: 599 - DNA, 19 bp, Artificial Sequence
  Description of Artificial Sequence: Synthetic oligonucleotide
gtgaatttggaggaggttt

SEQ ID NO: 600 - DNA, 22 bp, Artificial Sequence
  Description of Artificial Sequence: Synthetic oligonucleotide
ggggttgatattgtttttagag

SEQ ID NO: 601 - DNA, 19 bp, Artificial Sequence
  Description of Artificial Sequence: Synthetic oligonucleotide
cccctccttccttaaatct

SEQ ID NO: 602 - DNA, 21 bp, Artificial Sequence
  Description of Artificial Sequence: Synthetic oligonucleotide
ttttagaaggggttggtttag

SEQ ID NO: 603 - DNA, 21 bp, Artificial Sequence
  Description of Artificial Sequence: Synthetic oligonucleotide
actacctaactctccccacaa

SEQ ID NO: 604 - DNA, 21 bp, Artificial Sequence
  Description of Artificial Sequence: Synthetic oligonucleotide
ttgtggggagagttaggtagt

SEQ ID NO: 605 - DNA, 22 bp, Artificial Sequence
  Description of Artificial Sequence: Synthetic oligonucleotide
taacccaaatatcataaaaccc

SEQ ID NO: 606 - DNA, 22 bp, Artificial Sequence
  Description of Artificial Sequence: Synthetic oligonucleotide
agatggatattttgttggtgtt

SEQ ID NO: 607 - DNA, 25 bp, Artificial Sequence
  Description of Artificial Sequence: Synthetic oligonucleotide
tacacaattatacctttcaaacaat

SEQ ID NO: 608 - DNA, 25 bp, Artificial Sequence
  Description of Artificial Sequence: Synthetic oligonucleotide
ccatacaaatatcctaaataaaacc

SEQ ID NO: 609 - DNA, 23 bp, Artificial Sequence
  Description of Artificial Sequence: Synthetic oligonucleotide
ttgttggaagaattgatagtgtt

SEQ ID NO: 610 - DNA, 22 bp, Artificial Sequence
  Description of Artificial Sequence: Synthetic oligonucleotide
agggagttaagtaaggggttag

SEQ ID NO: 611 - DNA, 22 bp, Artificial Sequence
  Description of Artificial Sequence: Synthetic oligonucleotide
aacaccaacaaaatatccatct

SEQ ID NO: 612 - DNA, 22 bp, Artificial Sequence
  Description of Artificial Sequence: Synthetic oligonucleotide
tggaattttagggttagtaggg

SEQ ID NO: 613 - DNA, 22 bp, Artificial Sequence
  Description of Artificial Sequence: Synthetic oligonucleotide
caaataaaccaaaccactatca

SEQ ID NO: 614 - DNA, 20 bp, Artificial Sequence
  Description of Artificial Sequence: Synthetic oligonucleotide
ttgggatttttaggtggttt

SEQ ID NO: 615 - DNA, 22 bp, Artificial Sequence
  Description of Artificial Sequence: Synthetic oligonucleotide
ttcactttccctactaacccta

SEQ ID NO: 616 - DNA, 22 bp, Artificial Sequence
  Description of Artificial Sequence: Synthetic oligonucleotide
tgggttatttggtgagtattgt

SEQ ID NO: 617 - DNA, 18 bp, Artificial Sequence
  Description of Artificial Sequence: Synthetic oligonucleotide
cttacccccacccaacta

SEQ ID NO: 618 - DNA, 23 bp, Artificial Sequence
  Description of Artificial Sequence: Synthetic oligonucleotide
ttcacattacattaacccattta

SEQ ID NO: 619 - DNA, 22 bp, Artificial Sequence
  Description of Artificial Sequence: Synthetic oligonucleotide
ttggagttgttaggagaaaagt

SEQ ID NO: 620 - DNA, 22 bp, Artificial Sequence
  Description of Artificial Sequence: Synthetic oligonucleotide
ccttccttaaaaacctcaaaac

SEQ ID NO: 621 - DNA, 24 bp, Artificial Sequence
  Description of Artificial Sequence: Synthetic oligonucleotide
gtaaagaatggtagaggataggat

SEQ ID NO: 622 - DNA, 22 bp, Artificial Sequence
  Description of Artificial Sequence: Synthetic oligonucleotide
cttactacccaacctctttcac

SEQ ID NO: 623 - DNA, 22 bp, Artificial Sequence
  Description of Artificial Sequence: Synthetic oligonucleotide
tggaaggatagagaattttgtt

SEQ ID NO: 624 - DNA, 22 bp, Artificial Sequence
  Description of Artificial Sequence: Synthetic oligonucleotide
atcccatctctcaactcctact

SEQ ID NO: 625 - DNA, 22 bp, Artificial Sequence
  Description of Artificial Sequence: Synthetic oligonucleotide
tgatttattttgatgtgtggtt

SEQ ID NO: 626 - DNA, 22 bp, Artificial Sequence
  Description of Artificial Sequence: Synthetic oligonucleotide
tatttaaggattttggaaggag

SEQ ID NO: 627 - DNA, 24 bp, Artificial Sequence
  Description of Artificial Sequence: Synthetic oligonucleotide
tcatctcattttatctctacaacc

SEQ ID NO: 628 - DNA, 19 bp, Artificial Sequence
  Description of Artificial Sequence: Synthetic oligonucleotide
aacaaattcccaacacacc

SEQ ID NO: 629 - DNA, 22 bp, Artificial Sequence
  Description of Artificial Sequence: Synthetic oligonucleotide
ttttggaagatggtttattttt

SEQ ID NO: 630 - DNA, 22 bp, Artificial Sequence
  Description of Artificial Sequence: Synthetic oligonucleotide
tttttaatatggaggtaaggga

SEQ ID NO: 631 - DNA, 19 bp, Artificial Sequence
  Description of Artificial Sequence: Synthetic oligonucleotide
aaattcccaacacaccaac

SEQ ID NO: 632 - DNA, 21 bp, Artificial Sequence
  Description of Artificial Sequence: Synthetic oligonucleotide
cttctccaaaatcaaccaact

SEQ ID NO: 633 - DNA, 24 bp, Artificial Sequence
  Description of Artificial Sequence: Synthetic oligonucleotide
tttgtgttattagtaggtgagagg

SEQ ID NO: 634 - DNA, 21 bp, Artificial Sequence
  Description of Artificial Sequence: Synthetic oligonucleotide
ttagaagttggagggtgaaat

SEQ ID NO: 635 - DNA, 22 bp, Artificial Sequence
  Description of Artificial Sequence: Synthetic oligonucleotide
cttcctaccttaaacccttacc

SEQ ID NO: 636 - DNA, 23 bp, Artificial Sequence
  Description of Artificial Sequence: Synthetic oligonucleotide
tctaactcctcacaaattcctaa

SEQ ID NO: 637 - DNA, 21 bp, Artificial Sequence
  Description of Artificial Sequence: Synthetic oligonucleotide
gtagtgtaatagggaaagggg

SEQ ID NO: 638 - DNA, 22 bp, Artificial Sequence
  Description of Artificial Sequence: Synthetic oligonucleotide
taaaattccctcttaccctaaa

SEQ ID NO: 639 - DNA, 22 bp, Artificial Sequence
  Description of Artificial Sequence: Synthetic oligonucleotide
tagtaaggattgtagaaggggg

SEQ ID NO: 640 - DNA, 22 bp, Artificial Sequence
  Description of Artificial Sequence: Synthetic oligonucleotide
tagtaaggattgtagaaggggg

SEQ ID NO: 641 - DNA, 21 bp, Artificial Sequence
  Description of Artificial Sequence: Synthetic oligonucleotide
cctcaaaccctaaaaataacc

SEQ ID NO: 642 - DNA, 22 bp, Artificial Sequence
  Description of Artificial Sequence: Synthetic oligonucleotide
ggagaggagtgtttgtagaaga

SEQ ID NO: 643 - DNA, 21 bp, Artificial Sequence
  Description of Artificial Sequence: Synthetic oligonucleotide
caatctcccctaaatcctaat

SEQ ID NO: 644 - DNA, 22 bp, Artificial Sequence
  Description of Artificial Sequence: Synthetic oligonucleotide
tagtagtttgaagaaggggaag

SEQ ID NO: 645 - DNA, 23 bp, Artificial Sequence
  Description of Artificial Sequence: Synthetic oligonucleotide
aaacattcctaaaatcacaaaaa

SEQ ID NO: 646 - DNA, 24 bp, Artificial Sequence
  Description of Artificial Sequence: Synthetic oligonucleotide
tttatttgggtatgattaggtttt

SEQ ID NO: 647 - DNA, 19 bp, Artificial Sequence
  Description of Artificial Sequence: Synthetic oligonucleotide
actaaaaacaccaccccct

SEQ ID NO: 648 - DNA, 23 bp, Artificial Sequence
  Description of Artificial Sequence: Synthetic oligonucleotide
acaaaccaaaatcttacttccta

SEQ ID NO: 649 - DNA, 19 bp, Artificial Sequence
  Description of Artificial Sequence: Synthetic oligonucleotide
gaatggaggggaaatgtta

SEQ ID NO: 650 - DNA, 22 bp, Artificial Sequence
  Description of Artificial Sequence: Synthetic oligonucleotide
aaaactcctcccctctataaat

SEQ ID NO: 651 - DNA, 21 bp, Artificial Sequence
  Description of Artificial Sequence: Synthetic oligonucleotide
ttggagagatgtgttggttag

SEQ ID NO: 652 - DNA, 22 bp, Artificial Sequence
  Description of Artificial Sequence: Synthetic oligonucleotide
aatcctaaccaacacatctctc

SEQ ID NO: 653 - DNA, 22 bp, Artificial Sequence
  Description of Artificial Sequence: Synthetic oligonucleotide
aggggattttaaggtgattagt

SEQ ID NO: 654 - DNA, 21 bp, Artificial Sequence
  Description of Artificial Sequence: Synthetic oligonucleotide
ctccccatccatcttatttta

SEQ ID NO: 655 - DNA, 22 bp, Artificial Sequence
  Description of Artificial Sequence: Synthetic oligonucleotide
attgtttgggtgatagtgaagt

SEQ ID NO: 656 - DNA, 22 bp, Artificial Sequence
  Description of Artificial Sequence: Synthetic oligonucleotide
taagtttttggaggaagagttt

SEQ ID NO: 657 - DNA, 22 bp, Artificial Sequence
  Description of Artificial Sequence: Synthetic oligonucleotide
aaaatactccctataattcccc

SEQ ID NO: 658 - DNA, 23 bp, Artificial Sequence
  Description of Artificial Sequence: Synthetic oligonucleotide
tttctctaaccaaacacctaaaa

SEQ ID NO: 659 - DNA, 22 bp, Artificial Sequence
  Description of Artificial Sequence: Synthetic oligonucleotide
agaaattagtagaggagggagg

SEQ ID NO: 660 - DNA, 22 bp, Artificial Sequence
  Description of Artificial Sequence: Synthetic oligonucleotide
atctaatccctctcctaactcc

SEQ ID NO: 661 - DNA, 22 bp, Artificial Sequence
  Description of Artificial Sequence: Synthetic oligonucleotide
tttgttttggaatttaggtttt

SEQ ID NO: 662 - DNA, 23 bp, Artificial Sequence
  Description of Artificial Sequence: Synthetic oligonucleotide
tccacaaaactctcctactaaaa

SEQ ID NO: 663 - DNA, 21 bp, Artificial Sequence
  Description of Artificial Sequence: Synthetic oligonucleotide
ggaaggttgggtagatatagg

SEQ ID NO: 664 - DNA, 23 bp, Artificial Sequence
  Description of Artificial Sequence: Synthetic oligonucleotide
ttggtagagttgaaaggagatag

SEQ ID NO: 665 - DNA, 22 bp, Artificial Sequence
  Description of Artificial Sequence: Synthetic oligonucleotide
aaaaacattccctaaaaattcc

SEQ ID NO: 666 - DNA, 22 bp, Artificial Sequence
  Description of Artificial Sequence: Synthetic oligonucleotide
atagaatggttagggggtattt

SEQ ID NO: 667 - DNA, 22 bp, Artificial Sequence
  Description of Artificial Sequence: Synthetic oligonucleotide
tacaaatatcaacctctctccc

SEQ ID NO: 668 - DNA, 22 bp, Artificial Sequence
  Description of Artificial Sequence: Synthetic oligonucleotide
ggtggggtataatagtagggat

SEQ ID NO: 669 - DNA, 22 bp, Artificial Sequence
  Description of Artificial Sequence: Synthetic oligonucleotide
cttcccctctttcattttattt

SEQ ID NO: 670 - DNA, 22 bp, Artificial Sequence
  Description of Artificial Sequence: Synthetic oligonucleotide
gaggaattggtattgaaagaaa

SEQ ID NO: 671 - DNA, 21 bp, Artificial Sequence
  Description of Artificial Sequence: Synthetic oligonucleotide
ctaatccaccctccataaaac

SEQ ID NO: 672 - DNA, 22 bp, Artificial Sequence
  Description of Artificial Sequence: Synthetic oligonucleotide
ctccaattctcctccctatatc

SEQ ID NO: 673 - DNA, 20 bp, Artificial Sequence
  Description of Artificial Sequence: Synthetic oligonucleotide
taatttttgaggttgggaaa

SEQ ID NO: 674 - DNA, 17 bp, Artificial Sequence
  Description of Artificial Sequence: Synthetic oligonucleotide
gtatgtagttgtgtgtt

SEQ ID NO: 675 - DNA, 18 bp, Artificial Sequence
  Description of Artificial Sequence: Synthetic oligonucleotide
tttgagtattcgtaggaa

SEQ ID NO: 676 - DNA, 18 bp, Artificial Sequence
  Description of Artificial Sequence: Synthetic oligonucleotide
tattagtggtaatagtgg

SEQ ID NO: 677 - DNA, 17 bp, Artificial Sequence
  Description of Artificial Sequence: Synthetic oligonucleotide
tgtgtagtaggtggttt

SEQ ID NO: 678 - DNA, 17 bp, Artificial Sequence
  Description of Artificial Sequence: Synthetic oligonucleotide
agtttgatttggtgaat

SEQ ID NO: 679 - DNA, 18 bp, Artificial Sequence
  Description of Artificial Sequence: Synthetic oligonucleotide
tacgttgtttggacgaat

SEQ ID NO: 680 - DNA, 16 bp, Artificial Sequence
  Description of Artificial Sequence: Synthetic oligonucleotide
gtcggatttcggaagt

SEQ ID NO: 681 - DNA, 17 bp, Artificial Sequence
  Description of Artificial Sequence: Synthetic oligonucleotide
tggacgtaggaaagcga

SEQ ID NO: 682 - DNA, 17 bp, Artificial Sequence
  Description of Artificial Sequence: Synthetic oligonucleotide
gatgtaggaaagtgaga

SEQ ID NO: 683 - DNA, 20 bp, Artificial Sequence
  Description of Artificial Sequence: Synthetic oligonucleotide
atttacgggagttttatcgt

SEQ ID NO: 684 - DNA, 20 bp, Artificial Sequence
  Description of Artificial Sequence: Synthetic oligonucleotide
atttatgggagttttattgt

SEQ ID NO: 685 - DNA, 17 bp, Artificial Sequence
  Description of Artificial Sequence: Synthetic oligonucleotide
attagttcgggtcgcgt

SEQ ID NO: 686 - DNA, 17 bp, Artificial Sequence
  Description of Artificial Sequence: Synthetic oligonucleotide
attagtttgggttgtgt

SEQ ID NO: 687 - DNA, 18 bp, Artificial Sequence
  Description of Artificial Sequence: Synthetic oligonucleotide
tatacgaaagggaggcgg

SEQ ID NO: 688 - DNA, 18 bp, Artificial Sequence
  Description of Artificial Sequence: Synthetic oligonucleotide
tatatgaaagggaggtgg

SEQ ID NO: 689 - DNA, 18 bp, Artificial Sequence
  Description of Artificial Sequence: Synthetic oligonucleotide
ggcgtgtcgttagtttta

SEQ ID NO: 690 - DNA, 20 bp, Artificial Sequence
  Description of Artificial Sequence: Synthetic oligonucleotide
ggtgtgttgttagttttata

SEQ ID NO: 691 - DNA, 18 bp, Artificial Sequence
  Description of Artificial Sequence: Synthetic oligonucleotide
ttcgattgacgttagcga

SEQ ID NO: 692 - DNA, 18 bp, Artificial Sequence
  Description of Artificial Sequence: Synthetic oligonucleotide
tttgattgatgttagtga

SEQ ID NO: 693 - DNA, 16 bp, Artificial Sequence
  Description of Artificial Sequence: Synthetic oligonucleotide
tttcgagtttgacggt

SEQ ID NO: 694 - DNA, 17 bp, Artificial Sequence
  Description of Artificial Sequence: Synthetic oligonucleotide
ttttgagtttgatggtt

SEQ ID NO: 695 - DNA, 16 bp, Artificial Sequence
  Description of Artificial Sequence: Synthetic oligonucleotide
ttcggagggcgtattt

SEQ ID NO: 696 - DNA, 16 bp, Artificial Sequence
  Description of Artificial Sequence: Synthetic oligonucleotide
tttggagggtgtattt

SEQ ID NO: 697 - DNA, 16 bp, Artificial Sequence
  Description of Artificial Sequence: Synthetic oligonucleotide
gacgtcggtacgtagt

SEQ ID NO: 698 - DNA, 18 bp, Artificial Sequence
  Description of Artificial Sequence: Synthetic oligonucleotide
gatgttggtatgtagtag

SEQ ID NO: 699 - DNA, 17 bp, Artificial Sequence
  Description of Artificial Sequence: Synthetic oligonucleotide
ttcgggggaattcgagt

SEQ ID NO: 700 - DNA, 17 bp, Artificial Sequence
  Description of Artificial Sequence: Synthetic oligonucleotide
tttgggggaatttgagt

SEQ ID NO: 701 - DNA, 16 bp, Artificial Sequence
  Description of Artificial Sequence: Synthetic oligonucleotide
tattgcgaggattcgg

SEQ ID NO: 702 - DNA, 16 bp, Artificial Sequence
  Description of Artificial Sequence: Synthetic oligonucleotide
attgtgaggatttggt

SEQ ID NO: 703 - DNA, 16 bp, Artificial Sequence
  Description of Artificial Sequence: Synthetic oligonucleotide
gtgcgttcgtagcgta

SEQ ID NO: 704 - DNA, 17 bp, Artificial Sequence
  Description of Artificial Sequence: Synthetic oligonucleotide
tgtgtttgtagtgtagg

SEQ ID NO: 705 - DNA, 16 bp, Artificial Sequence
  Description of Artificial Sequence: Synthetic oligonucleotide
ggacgtcgtttgttag

SEQ ID NO: 706 - DNA, 17 bp, Artificial Sequence
  Description of Artificial Sequence: Synthetic oligonucleotide
ggatgttgtttgttagg

SEQ ID NO: 707 - DNA, 16 bp, Artificial Sequence
  Description of Artificial Sequence: Synthetic oligonucleotide
agagcgtcgttttgta

SEQ ID NO: 708 - DNA, 17 bp, Artificial Sequence
  Description of Artificial Sequence: Synthetic oligonucleotide
agagtgttgttttgtat

SEQ ID NO: 709 - DNA, 17 bp, Artificial Sequence
  Description of Artificial Sequence: Synthetic oligonucleotide
tttcgagggtaggcgag

SEQ ID NO: 710 - DNA, 17 bp, Artificial Sequence
  Description of Artificial Sequence: Synthetic oligonucleotide
ttttgagggtaggtgag

SEQ ID NO: 711 - DNA, 18 bp, Artificial Sequence
  Description of Artificial Sequence: Synthetic oligonucleotide
tttcgattttaatgcgaa

SEQ ID NO: 712 - DNA, 19 bp, Artificial Sequence
  Description of Artificial Sequence: Synthetic oligonucleotide
tttgattttaatgtgaagt

SEQ ID NO: 713 - DNA, 16 bp, Artificial Sequence
  Description of Artificial Sequence: Synthetic oligonucleotide
aggaatttcgtcgcga

SEQ ID NO: 714 - DNA, 17 bp, Artificial Sequence
  Description of Artificial Sequence: Synthetic oligonucleotide
aggaattttgttgtgat

SEQ ID NO: 715 - DNA, 16 bp, Artificial Sequence
  Description of Artificial Sequence: Synthetic oligonucleotide
tttgagtcgtacgcgt

SEQ ID NO: 716 - DNA, 17 bp, Artificial Sequence
  Description of Artificial Sequence: Synthetic oligonucleotide
ttttgagttgtatgtgt

SEQ ID NO: 717 - DNA, 16 bp, Artificial Sequence
  Description of Artificial Sequence: Synthetic oligonucleotide
tacgtagttgcgcgtt

SEQ ID NO: 718 - DNA, 16 bp, Artificial Sequence
  Description of Artificial Sequence: Synthetic oligonucleotide
aatcggcggttaggat

SEQ ID NO: 719 - DNA, 16 bp, Artificial Sequence
  Description of Artificial Sequence: Synthetic oligonucleotide
gaattggtggttagga

SEQ ID NO: 720 - DNA, 16 bp, Artificial Sequence
  Description of Artificial Sequence: Synthetic oligonucleotide
tttgatcgggtttgag

SEQ ID NO: 721 - DNA, 17 bp, Artificial Sequence
  Description of Artificial Sequence: Synthetic oligonucleotide
ttttgattgggtttgag

SEQ ID NO: 722 - DNA, 18 bp, Artificial Sequence
  Description of Artificial Sequence: Synthetic oligonucleotide
tgagtatttgtaggaaga

SEQ ID NO: 723 - DNA, 16 bp, Artificial Sequence
  Description of Artificial Sequence: Synthetic oligonucleotide
agaggcgcgggttata

SEQ ID NO: 724 - DNA, 16 bp, Artificial Sequence
  Description of Artificial Sequence: Synthetic oligonucleotide
tagaggtgtgggttat

SEQ ID NO: 725 - DNA, 18 bp, Artificial Sequence
  Description of Artificial Sequence: Synthetic oligonucleotide
ttagcggttaagttgcga

SEQ ID NO: 726 - DNA, 18 bp, Artificial Sequence
  Description of Artificial Sequence: Synthetic oligonucleotide
ttagtggttaagttgtga

SEQ ID NO: 727 - DNA, 20 bp, Artificial Sequence
  Description of Artificial Sequence: Synthetic oligonucleotide
ttcgtagaagaatacgcgta

SEQ ID NO: 728 - DNA, 20 bp, Artificial Sequence
  Description of Artificial Sequence: Synthetic oligonucleotide
tttgtagaagaatatgtgta

SEQ ID NO: 729 - DNA, 16 bp, Artificial Sequence
  Description of Artificial Sequence: Synthetic oligonucleotide
aaacgtttatcggttg

SEQ ID NO: 730 - DNA, 17 bp, Artificial Sequence
  Description of Artificial Sequence: Synthetic oligonucleotide
aatgtttattggttgga

SEQ ID NO: 731 - DNA, 17 bp, Artificial Sequence
  Description of Artificial Sequence: Synthetic oligonucleotide
tatcgtagttcgttcgg

SEQ ID NO: 732 - DNA, 17 bp, Artificial Sequence
  Description of Artificial Sequence: Synthetic oligonucleotide
attgtagtttgtttggt

SEQ ID NO: 733 - DNA, 17 bp, Artificial Sequence
  Description of Artificial Sequence: Synthetic oligonucleotide
tggtcggtatatttcga

SEQ ID NO: 734 - DNA, 18 bp, Artificial Sequence
  Description of Artificial Sequence: Synthetic oligonucleotide
ttggttggtatattttga

SEQ ID NO: 735 - DNA, 16 bp, Artificial Sequence
  Description of Artificial Sequence: Synthetic oligonucleotide
ggaggtttcggttcga

SEQ ID NO: 736 - DNA, 17 bp, Artificial Sequence
  Description of Artificial Sequence: Synthetic oligonucleotide
tggaggttttggtttga

SEQ ID NO: 737 - DNA, 16 bp, Artificial Sequence
  Description of Artificial Sequence: Synthetic oligonucleotide
ttagcggtaatagcgg

SEQ ID NO: 738 - DNA, 16 bp, Artificial Sequence
  Description of Artificial Sequence: Synthetic oligonucleotide
tgcgtagtaggcggtt

SEQ ID NO: 739 - DNA, 16 bp, Artificial Sequence
  Description of Artificial Sequence: Synthetic oligonucleotide
taggcggttgttcgta

SEQ ID NO: 740 - DNA, 16 bp, Artificial Sequence
  Description of Artificial Sequence: Synthetic oligonucleotide
aggtggttgtttgtaa

SEQ ID NO: 741 - DNA, 16 bp, Artificial Sequence
  Description of Artificial Sequence: Synthetic oligonucleotide
gttcgggtcgattcga

SEQ ID NO: 742 - DNA, 17 bp, Artificial Sequence
  Description of Artificial Sequence: Synthetic oligonucleotide
ggtttgggttgatttga

SEQ ID NO: 743 - DNA, 18 bp, Artificial Sequence
  Description of Artificial Sequence: Synthetic oligonucleotide
ttcgggatatattcgatt

SEQ ID NO: 744 - DNA, 19 bp, Artificial Sequence
  Description of Artificial Sequence: Synthetic oligonucleotide
ttttgggatatatttgatt

SEQ ID NO: 745 - DNA, 18 bp, Artificial Sequence
  Description of Artificial Sequence: Synthetic oligonucleotide
tattcgaattgtattcgt

SEQ ID NO: 746 - DNA, 20 bp, Artificial Sequence
  Description of Artificial Sequence: Synthetic oligonucleotide
tttgaattgtatttgtttat

SEQ ID NO: 747 - DNA, 16 bp, Artificial Sequence
  Description of Artificial Sequence: Synthetic oligonucleotide
ttaagttcgattcggt

SEQ ID NO: 748 - DNA, 16 bp, Artificial Sequence
  Description of Artificial Sequence: Synthetic oligonucleotide
tagttgttcgagaggg

SEQ ID NO: 749 - DNA, 16 bp, Artificial Sequence
  Description of Artificial Sequence: Synthetic oligonucleotide
agttgtttgagagggt

SEQ ID NO: 750 - DNA, 17 bp, Artificial Sequence
  Description of Artificial Sequence: Synthetic oligonucleotide
atagtatcgaggtgagt

SEQ ID NO: 751 - DNA, 18 bp, Artificial Sequence
  Description of Artificial Sequence: Synthetic oligonucleotide
atagtattgaggtgagtt

SEQ ID NO: 752 - DNA, 16 bp, Artificial Sequence
  Description of Artificial Sequence: Synthetic oligonucleotide
ttcgggattcgataat

SEQ ID NO: 753 - DNA, 16 bp, Artificial Sequence
  Description of Artificial Sequence: Synthetic oligonucleotide
aggttttgggatttga

SEQ ID NO: 754 - DNA, 16 bp, Artificial Sequence
  Description of Artificial Sequence: Synthetic oligonucleotide
ttaggacgcggcgata

SEQ ID NO: 755 - DNA, 16 bp, Artificial Sequence
  Description of Artificial Sequence: Synthetic oligonucleotide
aggatgtggtgatagt

SEQ ID NO: 756 - DNA, 16 bp, Artificial Sequence
  Description of Artificial Sequence: Synthetic oligonucleotide
ttgtacgttcggtatt

SEQ ID NO: 757 - DNA, 18 bp, Artificial Sequence
  Description of Artificial Sequence: Synthetic oligonucleotide
taagttgtatgtttggta

SEQ ID NO: 758 - DNA, 16 bp, Artificial Sequence
  Description of Artificial Sequence: Synthetic oligonucleotide
ggcgtcgaggtcgtag

SEQ ID NO: 759 - DNA, 17 bp, Artificial Sequence
  Description of Artificial Sequence: Synthetic oligonucleotide
ggtgttgaggttgtagt

SEQ ID NO: 760 - DNA, 17 bp, Artificial Sequence
  Description of Artificial Sequence: Synthetic oligonucleotide
agggtttcgattttcgg

SEQ ID NO: 761 - DNA, 17 bp, Artificial Sequence
  Description of Artificial Sequence: Synthetic oligonucleotide
agggttttgatttttgg

SEQ ID NO: 762 - DNA, 16 bp, Artificial Sequence
  Description of Artificial Sequence: Synthetic oligonucleotide
tggaacgtgcgattgt

SEQ ID NO: 763 - DNA, 16 bp, Artificial Sequence
  Description of Artificial Sequence: Synthetic oligonucleotide
tggaatgtgtgattgt

SEQ ID NO: 764 - DNA, 16 bp, Artificial Sequence
  Description of Artificial Sequence: Synthetic oligonucleotide
ttttggcgcgtttata

SEQ ID NO: 765 - DNA, 18 bp, Artificial Sequence
  Description of Artificial Sequence: Synthetic oligonucleotide
ttggtgtgtttatagata

SEQ ID NO: 766 - DNA, 17 bp, Artificial Sequence
  Description of Artificial Sequence: Synthetic oligonucleotide
agatttttacgattcga

SEQ ID NO: 767 - DNA, 20 bp, Artificial Sequence
  Description of Artificial Sequence: Synthetic oligonucleotide
tttttatgatttgaaataga

SEQ ID NO: 768 - DNA, 16 bp, Artificial Sequence
  Description of Artificial Sequence: Synthetic oligonucleotide
agtattttcgcgtgtt

SEQ ID NO: 769 - DNA, 19 bp, Artificial Sequence
  Description of Artificial Sequence: Synthetic oligonucleotide
tagtatttttgtgtgttaa

SEQ ID NO: 770 - DNA, 16 bp, Artificial Sequence
  Description of Artificial Sequence: Synthetic oligonucleotide
ttcgtcggcggtagag

SEQ ID NO: 771 - DNA, 16 bp, Artificial Sequence
  Description of Artificial Sequence: Synthetic oligonucleotide
tagagtttgttggtgg

SEQ ID NO: 772 - DNA, 16 bp, Artificial Sequence
  Description of Artificial Sequence: Synthetic oligonucleotide
gatcgcgggtacgttt

SEQ ID NO: 773 - DNA, 17 bp, Artificial Sequence
  Description of Artificial Sequence: Synthetic oligonucleotide
attgtgggtatgtttgt

SEQ ID NO: 774 - DNA, 16 bp, Artificial Sequence
  Description of Artificial Sequence: Synthetic oligonucleotide
ttaacgtcgttggtta

SEQ ID NO: 775 - DNA, 17 bp, Artificial Sequence
  Description of Artificial Sequence: Synthetic oligonucleotide
tgattaatgttgttggt

SEQ ID NO: 776 - DNA, 16 bp, Artificial Sequence
  Description of Artificial Sequence: Synthetic oligonucleotide
ttcgcgcgaagattta

SEQ ID NO: 777 - DNA, 17 bp, Artificial Sequence
  Description of Artificial Sequence: Synthetic oligonucleotide
gtttttgtgtgaagatt

SEQ ID NO: 778 - DNA, 16 bp, Artificial Sequence
  Description of Artificial Sequence: Synthetic oligonucleotide
ttcgatatcgtgacgg

SEQ ID NO: 779 - DNA, 18 bp, Artificial Sequence
  Description of Artificial Sequence: Synthetic oligonucleotide
ttttgatattgtgatggt

SEQ ID NO: 780 - DNA, 16 bp, Artificial Sequence
  Description of Artificial Sequence: Synthetic oligonucleotide
agaatacggtcgtaga

SEQ ID NO: 781 - DNA, 19 bp, Artificial Sequence
  Description of Artificial Sequence: Synthetic oligonucleotide
tagaatatggttgtagata

SEQ ID NO: 782 - DNA, 16 bp, Artificial Sequence
  Description of Artificial Sequence: Synthetic oligonucleotide
tatttttgcgtacggg

SEQ ID NO: 783 - DNA, 17 bp, Artificial Sequence
  Description of Artificial Sequence: Synthetic oligonucleotide
atttttgtgtatgggtt

SEQ ID NO: 784 - DNA, 16 bp, Artificial Sequence
  Description of Artificial Sequence: Synthetic oligonucleotide
ttacggtgaaggcgga

SEQ ID NO: 785 - DNA, 16 bp, Artificial Sequence
  Description of Artificial Sequence: Synthetic oligonucleotide
ttatggtgaaggtgga

SEQ ID NO: 786 - DNA, 20 bp, Artificial Sequence
  Description of Artificial Sequence: Synthetic oligonucleotide
ttcgggattaatatcgagat

SEQ ID NO: 787 - DNA, 20 bp, Artificial Sequence
  Description of Artificial Sequence: Synthetic oligonucleotide
tttgggattaatattgagat

SEQ ID NO: 788 - DNA, 17 bp, Artificial Sequence
  Description of Artificial Sequence: Synthetic oligonucleotide
tttcggttttcgttaat

SEQ ID NO: 789 - DNA, 20 bp, Artificial Sequence
  Description of Artificial Sequence: Synthetic oligonucleotide
tttggtttttgttaatttag

SEQ ID NO: 790 - DNA, 16 bp, Artificial Sequence
  Description of Artificial Sequence: Synthetic oligonucleotide
tgtgcgaagttaacgt

SEQ ID NO: 791 - DNA, 17 bp, Artificial Sequence
  Description of Artificial Sequence: Synthetic oligonucleotide
ttgtgtgaagttaatgt

SEQ ID NO: 792 - DNA, 16 bp, Artificial Sequence
  Description of Artificial Sequence: Synthetic oligonucleotide
aagtttatcggcgttt

SEQ ID NO: 793 - DNA, 18 bp, Artificial Sequence
  Description of Artificial Sequence: Synthetic oligonucleotide
agaagtttattggtgttt

SEQ ID NO: 794 - DNA, 18 bp, Artificial Sequence
  Description of Artificial Sequence: Synthetic oligonucleotide
atttcggaatttaagcgt

SEQ ID NO: 795 - DNA, 18 bp, Artificial Sequence
  Description of Artificial Sequence: Synthetic oligonucleotide
tttggaatttaagtgttt

SEQ ID NO: 796 - DNA, 16 bp, Artificial Sequence
  Description of Artificial Sequence: Synthetic oligonucleotide
ttttcgcgattggaga

SEQ ID NO: 797 - DNA, 17 bp, Artificial Sequence
  Description of Artificial Sequence: Synthetic oligonucleotide
gtttttgtgattggaga

SEQ ID NO: 798 - DNA, 16 bp, Artificial Sequence
  Description of Artificial Sequence: Synthetic oligonucleotide
atttacgcgttttagg

SEQ ID NO: 799 - DNA, 18 bp, Artificial Sequence
  Description of Artificial Sequence: Synthetic oligonucleotide
atggaatttatgtgtttt

SEQ ID NO: 800 - DNA, 16 bp, Artificial Sequence
  Description of Artificial Sequence: Synthetic oligonucleotide
atgtcgcggttttata

SEQ ID NO: 801 - DNA, 17 bp, Artificial Sequence
  Description of Artificial Sequence: Synthetic oligonucleotide
ggatgttgtggttttat

SEQ ID NO: 802 - DNA, 16 bp, Artificial Sequence
  Description of Artificial Sequence: Synthetic oligonucleotide
agacggggtttacgag

SEQ ID NO: 803 - DNA, 16 bp, Artificial Sequence
  Description of Artificial Sequence: Synthetic oligonucleotide
agatggggtttatgag

SEQ ID NO: 804 - DNA, 16 bp, Artificial Sequence
  Description of Artificial Sequence: Synthetic oligonucleotide
tgtcggtattagcgtt

SEQ ID NO: 805 - DNA, 17 bp, Artificial Sequence
  Description of Artificial Sequence: Synthetic oligonucleotide
gtgttggtattagtgtt

SEQ ID NO: 806 - DNA, 16 bp, Artificial Sequence
  Description of Artificial Sequence: Synthetic oligonucleotide
tggtttacgttcggta

SEQ ID NO: 807 - DNA, 17 bp, Artificial Sequence
  Description of Artificial Sequence: Synthetic oligonucleotide
ggtttatgtttggtagt

SEQ ID NO: 808 - DNA, 16 bp, Artificial Sequence
  Description of Artificial Sequence: Synthetic oligonucleotide
ttcgtacggttaggtt

SEQ ID NO: 809 - DNA, 17 bp, Artificial Sequence
  Description of Artificial Sequence: Synthetic oligonucleotide
agttttgtatggttagg

SEQ ID NO: 810 - DNA, 16 bp, Artificial Sequence
  Description of Artificial Sequence: Synthetic oligonucleotide
atagcgatttcggcga

SEQ ID NO: 811 - DNA, 16 bp, Artificial Sequence
  Description of Artificial Sequence: Synthetic oligonucleotide
agtgattttggtgaga

SEQ ID NO: 812 - DNA, 18 bp, Artificial Sequence
  Description of Artificial Sequence: Synthetic oligonucleotide
ggcgttttatttacgaga

SEQ ID NO: 813 - DNA, 18 bp, Artificial Sequence
  Description of Artificial Sequence: Synthetic oligonucleotide
gggtgttttatttatgag

SEQ ID NO: 814 - DNA, 17 bp, Artificial Sequence
  Description of Artificial Sequence: Synthetic oligonucleotide
atcgtggacggtaacga

SEQ ID NO: 815 - DNA, 17 bp, Artificial Sequence
  Description of Artificial Sequence: Synthetic oligonucleotide
attgtggatggtaatga

SEQ ID NO: 816 - DNA, 16 bp, Artificial Sequence
  Description of Artificial Sequence: Synthetic oligonucleotide
ttgagatcgattcgtt

SEQ ID NO: 817 - DNA, 18 bp, Artificial Sequence
  Description of Artificial Sequence: Synthetic oligonucleotide
tgagattgatttgtttag

SEQ ID NO: 818 - DNA, 16 bp, Artificial Sequence
  Description of Artificial Sequence: Synthetic oligonucleotide
ggcgagattcgtacgt

SEQ ID NO: 819 - DNA, 17 bp, Artificial Sequence
  Description of Artificial Sequence: Synthetic oligonucleotide
ggtgagatttgtatgtt

SEQ ID NO: 820 - DNA, 16 bp, Artificial Sequence
  Description of Artificial Sequence: Synthetic oligonucleotide
tgacgttcgtggtgga

SEQ ID NO: 821 - DNA, 16 bp, Artificial Sequence
  Description of Artificial Sequence: Synthetic oligonucleotide
gatgtttgtggtggag

SEQ ID NO: 822 - DNA, 16 bp, Artificial Sequence
  Description of Artificial Sequence: Synthetic oligonucleotide
gtgatcgattacggta

SEQ ID NO: 823 - DNA, 17 bp, Artificial Sequence
  Description of Artificial Sequence: Synthetic oligonucleotide
aggtgattgattatggt

SEQ ID NO: 824 - DNA, 16 bp, Artificial Sequence
  Description of Artificial Sequence: Synthetic oligonucleotide
attattcgttcggtga

SEQ ID NO: 825 - DNA, 18 bp, Artificial Sequence
  Description of Artificial Sequence: Synthetic oligonucleotide
tattatttgtttggtgag

SEQ ID NO: 826 - DNA, 16 bp, Artificial Sequence
  Description of Artificial Sequence: Synthetic oligonucleotide
tatcgtcgttaagtgt

SEQ ID NO: 827 - DNA, 19 bp, Artificial Sequence
  Description of Artificial Sequence: Synthetic oligonucleotide
tattattgttgttaagtgt

SEQ ID NO: 828 - DNA, 16 bp, Artificial Sequence
  Description of Artificial Sequence: Synthetic oligonucleotide
tgtaagcgcgagaata

SEQ ID NO: 829 - DNA, 17 bp, Artificial Sequence
  Description of Artificial Sequence: Synthetic oligonucleotide
agtgtaagtgtgagaat

SEQ ID NO: 830 - DNA, 16 bp, Artificial Sequence
  Description of Artificial Sequence: Synthetic oligonucleotide
tatagcggtttacggt

SEQ ID NO: 831 - DNA, 17 bp, Artificial Sequence
  Description of Artificial Sequence: Synthetic oligonucleotide
tagtggtttatggtagt

SEQ ID NO: 832 - DNA, 16 bp, Artificial Sequence
  Description of Artificial Sequence: Synthetic oligonucleotide
agggcgattaggacgt

SEQ ID NO: 833 - DNA, 16 bp, Artificial Sequence
  Description of Artificial Sequence: Synthetic oligonucleotide
agggtgattaggatgt

SEQ ID NO: 834 - DNA, 17 bp, Artificial Sequence
  Description of Artificial Sequence: Synthetic oligonucleotide
ttcgttagagttcgtag

SEQ ID NO: 835 - DNA, 18 bp, Artificial Sequence
  Description of Artificial Sequence: Synthetic oligonucleotide
tttgttagagtttgtagt

SEQ ID NO: 836 - DNA, 16 bp, Artificial Sequence
  Description of Artificial Sequence: Synthetic oligonucleotide
tgagacgtttgtcggt

SEQ ID NO: 837 - DNA, 16 bp, Artificial Sequence
  Description of Artificial Sequence: Synthetic oligonucleotide
tgagatgtttgttggt

SEQ ID NO: 838 - DNA, 16 bp, Artificial Sequence
  Description of Artificial Sequence: Synthetic oligonucleotide
gaaaagttcgtcggtt

SEQ ID NO: 839 - DNA, 17 bp, Artificial Sequence
  Description of Artificial Sequence: Synthetic oligonucleotide
agaaaagtttgttggtt

SEQ ID NO: 840 - DNA, 16 bp, Artificial Sequence
  Description of Artificial Sequence: Synthetic oligonucleotide
atggcgtagtcgcgat

SEQ ID NO: 841 - DNA, 16 bp, Artificial Sequence
  Description of Artificial Sequence: Synthetic oligonucleotide
tggtgtagttgtgatt

SEQ ID NO: 842 - DNA, 16 bp, Artificial Sequence
  Description of Artificial Sequence: Synthetic oligonucleotide
ttttgacgtcgatgta

SEQ ID NO: 843 - DNA, 18 bp, Artificial Sequence
  Description of Artificial Sequence: Synthetic oligonucleotide
tgatgttgatgtagaatt

SEQ ID NO: 844 - DNA, 16 bp, Artificial Sequence
  Description of Artificial Sequence: Synthetic oligonucleotide
ttgcgatgtgcgttta

SEQ ID NO: 845 - DNA, 17 bp, Artificial Sequence
  Description of Artificial Sequence: Synthetic oligonucleotide
tgtgatgtgtgtttagt

SEQ ID NO: 846 - DNA, 16 bp, Artificial Sequence
  Description of Artificial Sequence: Synthetic oligonucleotide
tgattacggcgcggat

SEQ ID NO: 847 - DNA, 16 bp, Artificial Sequence
  Description of Artificial Sequence: Synthetic oligonucleotide
attatggtgtggatgg

SEQ ID NO: 848 - DNA, 16 bp, Artificial Sequence
  Description of Artificial Sequence: Synthetic oligonucleotide
agatggcgacgtcgaa

SEQ ID NO: 849 - DNA, 16 bp, Artificial Sequence
  Description of Artificial Sequence: Synthetic oligonucleotide
atggtgatgttgaaga

SEQ ID NO: 850 - DNA, 16 bp, Artificial Sequence
  Description of Artificial Sequence: Synthetic oligonucleotide
tttaagcgcggcggta

SEQ ID NO: 851 - DNA, 17 bp, Artificial Sequence
  Description of Artificial Sequence: Synthetic oligonucleotide
ttttaagtgtggtggta

SEQ ID NO: 852 - DNA, 16 bp, Artificial Sequence
  Description of Artificial Sequence: Synthetic oligonucleotide
agaaacgtagacgcga

SEQ ID NO: 853 - DNA, 17 bp, Artificial Sequence
  Description of Artificial Sequence: Synthetic oligonucleotide
aatgtagatgtgatgga

SEQ ID NO: 854 - DNA, 16 bp, Artificial Sequence
  Description of Artificial Sequence: Synthetic oligonucleotide
agagacgcgaaaaatt

SEQ ID NO: 855 - DNA, 18 bp, Artificial Sequence
  Description of Artificial Sequence: Synthetic oligonucleotide
tagagagatgtgaaaaat

SEQ ID NO: 856 - DNA, 16 bp, Artificial Sequence
  Description of Artificial Sequence: Synthetic oligonucleotide
agacgaaagagtcgtt

SEQ ID NO: 857 - DNA, 17 bp, Artificial Sequence
  Description of Artificial Sequence: Synthetic oligonucleotide
agagatgaaagagttgt

SEQ ID NO: 858 - DNA, 16 bp, Artificial Sequence
  Description of Artificial Sequence: Synthetic oligonucleotide
ttttagttcgagcgta

SEQ ID NO: 859 - DNA, 18 bp, Artificial Sequence
  Description of Artificial Sequence: Synthetic oligonucleotide
ttagtttgagtgtagtta

SEQ ID NO: 860 - DNA, 17 bp, Artificial Sequence
  Description of Artificial Sequence: Synthetic oligonucleotide
gacgtgaattttcggaa

SEQ ID NO: 861 - DNA, 17 bp, Artificial Sequence
  Description of Artificial Sequence: Synthetic oligonucleotide
aggatgtgaatttttgg

SEQ ID NO: 862 - DNA, 16 bp, Artificial Sequence
  Description of Artificial Sequence: Synthetic oligonucleotide
aatgcgtggtcgtttt

SEQ ID NO: 863 - DNA, 16 bp, Artificial Sequence
  Description of Artificial Sequence: Synthetic oligonucleotide
gaaatgtgtggttgtt

SEQ ID NO: 864 - DNA, 16 bp, Artificial Sequence
  Description of Artificial Sequence: Synthetic oligonucleotide
tttcgtttgcggaatt

SEQ ID NO: 865 - DNA, 17 bp, Artificial Sequence
  Description of Artificial Sequence: Synthetic oligonucleotide
ttttgtttgtggaattg

SEQ ID NO: 866 - DNA, 16 bp, Artificial Sequence
  Description of Artificial Sequence: Synthetic oligonucleotide
tgttcgacgtgatttt

SEQ ID NO: 867 - DNA, 17 bp, Artificial Sequence
  Description of Artificial Sequence: Synthetic oligonucleotide
gtgtttgatgtgatttt

SEQ ID NO: 868 - DNA, 16 bp, Artificial Sequence
  Description of Artificial Sequence: Synthetic oligonucleotide
taacgttttttcgggt

SEQ ID NO: 869 - DNA, 18 bp, Artificial Sequence
  Description of Artificial Sequence: Synthetic oligonucleotide
ttaatgtttttttgggtg

SEQ ID NO: 870 - DNA, 17 bp, Artificial Sequence
  Description of Artificial Sequence: Synthetic oligonucleotide
tgttgattcggaaatga

SEQ ID NO: 871 - DNA, 18 bp, Artificial Sequence
  Description of Artificial Sequence: Synthetic oligonucleotide
tttgttgatttggaaatg

SEQ ID NO: 872 - DNA, 16 bp, Artificial Sequence
  Description of Artificial Sequence: Synthetic oligonucleotide
ttggagcgcgagaaag

SEQ ID NO: 873 - DNA, 16 bp, Artificial Sequence
  Description of Artificial Sequence: Synthetic oligonucleotide
ttggagtgtgagaaag

SEQ ID NO: 874 - DNA, 16 bp, Artificial Sequence
  Description of Artificial Sequence: Synthetic oligonucleotide
tacgttatcggttcgt

SEQ ID NO: 875 - DNA, 19 bp, Artificial Sequence
  Description of Artificial Sequence: Synthetic oligonucleotide
tatgttattggtttgtatt

SEQ ID NO: 876 - DNA, 17 bp, Artificial Sequence
  Description of Artificial Sequence: Synthetic oligonucleotide
attaggttcgtgggcgt

SEQ ID NO: 877 - DNA, 17 bp, Artificial Sequence
  Description of Artificial Sequence: Synthetic oligonucleotide
attaggtttgtgggtgt

SEQ ID NO: 878 - DNA, 18 bp, Artificial Sequence
  Description of Artificial Sequence: Synthetic oligonucleotide
tgcggtttagaaacgtag

SEQ ID NO: 879 - DNA, 18 bp, Artificial Sequence
  Description of Artificial Sequence: Synthetic oligonucleotide
tgtggtttagaaatgtag

SEQ ID NO: 880 - DNA, 16 bp, Artificial Sequence
  Description of Artificial Sequence: Synthetic oligonucleotide
gaacgggtttcgtagt

SEQ ID NO: 881 - DNA, 16 bp, Artificial Sequence
  Description of Artificial Sequence: Synthetic oligonucleotide
gggaatgggttttgta

SEQ ID NO: 882 - DNA, 16 bp, Artificial Sequence
  Description of Artificial Sequence: Synthetic oligonucleotide
ttgcgatagtcggcgg

SEQ ID NO: 883 - DNA, 16 bp, Artificial Sequence
  Description of Artificial Sequence: Synthetic oligonucleotide
ttgtgatagttggtgg

SEQ ID NO: 884 - DNA, 16 bp, Artificial Sequence
  Description of Artificial Sequence: Synthetic oligonucleotide
aagaacggacgtgttt

SEQ ID NO: 885 - DNA, 16 bp, Artificial Sequence
  Description of Artificial Sequence: Synthetic oligonucleotide
aggaagaatggatgtg

SEQ ID NO: 886 - DNA, 16 bp, Artificial Sequence
  Description of Artificial Sequence: Synthetic oligonucleotide
aagtttcgtttgggag

SEQ ID NO: 887 - DNA, 17 bp, Artificial Sequence
  Description of Artificial Sequence: Synthetic oligonucleotide
aaagttttgtttgggag

SEQ ID NO: 888 - DNA, 16 bp, Artificial Sequence
  Description of Artificial Sequence: Synthetic oligonucleotide
ttggaagtcgaagaga

SEQ ID NO: 889 - DNA, 17 bp, Artificial Sequence
  Description of Artificial Sequence: Synthetic oligonucleotide
tttggaagttgaagaga

SEQ ID NO: 890 - DNA, 16 bp, Artificial Sequence
  Description of Artificial Sequence: Synthetic oligonucleotide
tatcgggttcgatttt

SEQ ID NO: 891 - DNA, 16 bp, Artificial Sequence
  Description of Artificial Sequence: Synthetic oligonucleotide
ggtgtattgggtttga

SEQ ID NO: 892 - DNA, 16 bp, Artificial Sequence
  Description of Artificial Sequence: Synthetic oligonucleotide
tagggattcgcggagg

SEQ ID NO: 893 - DNA, 16 bp, Artificial Sequence
  Description of Artificial Sequence: Synthetic oligonucleotide
tagggatttgtggagg

SEQ ID NO: 894 - DNA, 18 bp, Artificial Sequence
  Description of Artificial Sequence: Synthetic oligonucleotide
ttgtcgagtaattttcgt

SEQ ID NO: 895 - DNA, 18 bp, Artificial Sequence
  Description of Artificial Sequence: Synthetic oligonucleotide
tgttgagtaatttttgtt

SEQ ID NO: 896 - DNA, 16 bp, Artificial Sequence
  Description of Artificial Sequence: Synthetic oligonucleotide
tattacgggcggaggg

SEQ ID NO: 897 - DNA, 16 bp, Artificial Sequence
  Description of Artificial Sequence: Synthetic oligonucleotide
tattatgggtggaggg

SEQ ID NO: 898 - DNA, 16 bp, Artificial Sequence
  Description of Artificial Sequence: Synthetic oligonucleotide
gacggtacgttagagg

SEQ ID NO: 899 - DNA, 17 bp, Artificial Sequence
  Description of Artificial Sequence: Synthetic oligonucleotide
gatggtatgttagaggt

SEQ ID NO: 900 - DNA, 16 bp, Artificial Sequence
  Description of Artificial Sequence: Synthetic oligonucleotide
ttgggcgtcgttatta

SEQ ID NO: 901 - DNA, 17 bp, Artificial Sequence
  Description of Artificial Sequence: Synthetic oligonucleotide
tgggtgttgttattagt

SEQ ID NO: 902 - DNA, 16 bp, Artificial Sequence
  Description of Artificial Sequence: Synthetic oligonucleotide
tattagttcggtcgtt

SEQ ID NO: 903 - DNA, 17 bp, Artificial Sequence
  Description of Artificial Sequence: Synthetic oligonucleotide
agtttggttgttagttt

SEQ ID NO: 904 - DNA, 17 bp, Artificial Sequence
  Description of Artificial Sequence: Synthetic oligonucleotide
ttattacgtttagcgat

SEQ ID NO: 905 - DNA, 21 bp, Artificial Sequence
  Description of Artificial Sequence: Synthetic oligonucleotide
tttttattatgtttagtgata

SEQ ID NO: 906 - DNA, 16 bp, Artificial Sequence
  Description of Artificial Sequence: Synthetic oligonucleotide
atagcgagtgcgatat

SEQ ID NO: 907 - DNA, 16 bp, Artificial Sequence
  Description of Artificial Sequence: Synthetic oligonucleotide
agggtcgtagcggtag

SEQ ID NO: 908 - DNA, 16 bp, Artificial Sequence
  Description of Artificial Sequence: Synthetic oligonucleotide
gagggttgtagtggta

SEQ ID NO: 909 - DNA, 17 bp, Artificial Sequence
  Description of Artificial Sequence: Synthetic oligonucleotide
tagacgtggggttacgt

SEQ ID NO: 910 - DNA, 17 bp, Artificial Sequence
  Description of Artificial Sequence: Synthetic oligonucleotide
tagatgtggggttatgt

SEQ ID NO: 911 - DNA, 18 bp, Artificial Sequence
  Description of Artificial Sequence: Synthetic oligonucleotide
atttcggggtagtatcgt

SEQ ID NO: 912 - DNA, 18 bp, Artificial Sequence
  Description of Artificial Sequence: Synthetic oligonucleotide
attttggggtagtattgt

SEQ ID NO: 913 - DNA, 16 bp, Artificial Sequence
  Description of Artificial Sequence: Synthetic oligonucleotide
tacgcgcgttttaaaa

SEQ ID NO: 914 - DNA, 19 bp, Artificial Sequence
  Description of Artificial Sequence: Synthetic oligonucleotide
ttatgtgtgttttaaaatg

SEQ ID NO: 915 - DNA, 21 bp, Artificial Sequence
  Description of Artificial Sequence: Synthetic oligonucleotide
tacgatatcgttatataacgg

SEQ ID NO: 916 - DNA, 21 bp, Artificial Sequence
  Description of Artificial Sequence: Synthetic oligonucleotide
tatgatattgttatataatgg

SEQ ID NO: 917 - DNA, 16 bp, Artificial Sequence
  Description of Artificial Sequence: Synthetic oligonucleotide
tataggttcgcggttt

SEQ ID NO: 918 - DNA, 18 bp, Artificial Sequence
  Description of Artificial Sequence: Synthetic oligonucleotide
tatataggtttgtggttt

SEQ ID NO: 919 - DNA, 16 bp, Artificial Sequence
  Description of Artificial Sequence: Synthetic oligonucleotide
taggtgcgcgttatat

SEQ ID NO: 920 - DNA, 17 bp, Artificial Sequence
  Description of Artificial Sequence: Synthetic oligonucleotide
atgtaggtgtgtgttat

SEQ ID NO: 921 - DNA, 18 bp, Artificial Sequence
  Description of Artificial Sequence: Synthetic oligonucleotide
tatgttgtttggatgaat

SEQ ID NO: 922 - DNA, 16 bp, Artificial Sequence
  Description of Artificial Sequence: Synthetic oligonucleotide
aaggagcgtatttcgg

SEQ ID NO: 923 - DNA, 16 bp, Artificial Sequence
  Description of Artificial Sequence: Synthetic oligonucleotide
aggagtgtattttggg

SEQ ID NO: 924 - DNA, 17 bp, Artificial Sequence
  Description of Artificial Sequence: Synthetic oligonucleotide
gttggattttggaagtg

SEQ ID NO: 925 - DNA, 16 bp, Artificial Sequence
  Description of Artificial Sequence: Synthetic oligonucleotide
gaagtgacgcgttcgt

SEQ ID NO: 926 - DNA, 16 bp, Artificial Sequence
  Description of Artificial Sequence: Synthetic oligonucleotide
gaagtgatgtgtttgt

SEQ ID NO: 927 - DNA, 16 bp, Artificial Sequence
  Description of Artificial Sequence: Synthetic oligonucleotide
tgttatcgttgcgcga

SEQ ID NO: 928 - DNA, 17 bp, Artificial Sequence
  Description of Artificial Sequence: Synthetic oligonucleotide
atgttattgttgtgtga

SEQ ID NO: 929 - DNA, 16 bp, Artificial Sequence
  Description of Artificial Sequence: Synthetic oligonucleotide
tgaaaacgtttttcgt

SEQ ID NO: 930 - DNA, 19 bp, Artificial Sequence
  Description of Artificial Sequence: Synthetic oligonucleotide
aatgttttttgtaaagaaa

SEQ ID NO: 931 - DNA, 16 bp, Artificial Sequence
  Description of Artificial Sequence: Synthetic oligonucleotide
aggatttcggcgttat

SEQ ID NO: 932 - DNA, 17 bp, Artificial Sequence
  Description of Artificial Sequence: Synthetic oligonucleotide
aaaggattttggtgtta

SEQ ID NO: 933 - DNA, 16 bp, Artificial Sequence
  Description of Artificial Sequence: Synthetic oligonucleotide
atttattcgtgcgttt

SEQ ID NO: 934 - DNA, 17 bp, Artificial Sequence
  Description of Artificial Sequence: Synthetic oligonucleotide
tatttgtgtgtttaggg

SEQ ID NO: 935 - DNA, 17 bp, Artificial Sequence
  Description of Artificial Sequence: Synthetic oligonucleotide
tttcggtggttttcgaa

SEQ ID NO: 936 - DNA, 17 bp, Artificial Sequence
  Description of Artificial Sequence: Synthetic oligonucleotide
tttggtggtttttgaag

SEQ ID NO: 937 - DNA, 16 bp, Artificial Sequence
  Description of Artificial Sequence: Synthetic oligonucleotide
ggcgtacggaatttta

SEQ ID NO: 938 - DNA, 17 bp, Artificial Sequence
  Description of Artificial Sequence: Synthetic oligonucleotide
gggtgtatggaatttta

SEQ ID NO: 939 - DNA, 16 bp, Artificial Sequence
  Description of Artificial Sequence: Synthetic oligonucleotide
tggacggaggtttcgt

SEQ ID NO: 940 - DNA, 16 bp, Artificial Sequence
  Description of Artificial Sequence: Synthetic oligonucleotide
tggatggaggttttgt

SEQ ID NO: 941 - DNA, 16 bp, Artificial Sequence
  Description of Artificial Sequence: Synthetic oligonucleotide
tgcggacgggatagtt

SEQ ID NO: 942 - DNA, 16 bp, Artificial Sequence
  Description of Artificial Sequence: Synthetic oligonucleotide
tgtggatgggatagtt

SEQ ID NO: 943 - DNA, 16 bp, Artificial Sequence
  Description of Artificial Sequence: Synthetic oligonucleotide
tgattagtcgattcgt

SEQ ID NO: 944 - DNA, 16 bp, Artificial Sequence
  Description of Artificial Sequence: Synthetic oligonucleotide
gatgtagggatggaga

SEQ ID NO: 945 - DNA, 20 bp, Artificial Sequence
  Description of Artificial Sequence: Synthetic oligonucleotide
tatcgtggttttttacgtat

SEQ ID NO: 946 - DNA, 20 bp, Artificial Sequence
  Description of Artificial Sequence: Synthetic oligonucleotide
atattgtggttttttatgta

SEQ ID NO: 947 - DNA, 16 bp, Artificial Sequence
  Description of Artificial Sequence: Synthetic oligonucleotide
tttattcggtgttcga

SEQ ID NO: 948 - DNA, 17 bp, Artificial Sequence
  Description of Artificial Sequence: Synthetic oligonucleotide
tatttggtgtttgagag

SEQ ID NO: 949 - DNA, 16 bp, Artificial Sequence
  Description of Artificial Sequence: Synthetic oligonucleotide
ggtttcgtttaatcgt

SEQ ID NO: 950 - DNA, 18 bp, Artificial Sequence
  Description of Artificial Sequence: Synthetic oligonucleotide
gggttttgtttaattgta

SEQ ID NO: 951 - DNA, 17 bp, Artificial Sequence
  Description of Artificial Sequence: Synthetic oligonucleotide
gattcgtatttcgtagt

SEQ ID NO: 952 - DNA, 18 bp, Artificial Sequence
  Description of Artificial Sequence: Synthetic oligonucleotide
tttgtattttgtagtggg

SEQ ID NO: 953 - DNA, 16 bp, Artificial Sequence
  Description of Artificial Sequence: Synthetic oligonucleotide
ttcgtatttagcggat

SEQ ID NO: 954 - DNA, 17 bp, Artificial Sequence
  Description of Artificial Sequence: Synthetic oligonucleotide
ggtttgtatttagtgga

SEQ ID NO: 955 - DNA, 16 bp, Artificial Sequence
  Description of Artificial Sequence: Synthetic oligonucleotide
ttaatcggcgggtttt

SEQ ID NO: 956 - DNA, 16 bp, Artificial Sequence
  Description of Artificial Sequence: Synthetic oligonucleotide
agttaattggtgggtt

SEQ ID NO: 957 - DNA, 18 bp, Artificial Sequence
  Description of Artificial Sequence: Synthetic oligonucleotide
tattttggcgggttgtat

SEQ ID NO: 958 - DNA, 18 bp, Artificial Sequence
  Description of Artificial Sequence: Synthetic oligonucleotide
tattttggtgggttgtat

SEQ ID NO: 959 - DNA, 18 bp, Artificial Sequence
  Description of Artificial Sequence: Synthetic oligonucleotide
aaggttatcggtttaaga

SEQ ID NO: 960 - DNA, 18 bp, Artificial Sequence
  Description of Artificial Sequence: Synthetic oligonucleotide
aaggttattggtttaaga

SEQ ID NO: 961 - DNA, 18 bp, Artificial Sequence
  Description of Artificial Sequence: Synthetic oligonucleotide
gggggacgacgtttttgt

SEQ ID NO: 962 - DNA, 18 bp, Artificial Sequence
  Description of Artificial Sequence: Synthetic oligonucleotide
gggggatgatgtttttgt

SEQ ID NO: 963 - DNA, 16 bp, Artificial Sequence
  Description of Artificial Sequence: Synthetic oligonucleotide
ttacggttcggttatt

SEQ ID NO: 964 - DNA, 17 bp, Artificial Sequence
  Description of Artificial Sequence: Synthetic oligonucleotide
aggttttatggtttggt

SEQ ID NO: 965 - DNA, 16 bp, Artificial Sequence
  Description of Artificial Sequence: Synthetic oligonucleotide
gacgtcgcggggttag

SEQ ID NO: 966 - DNA, 16 bp, Artificial Sequence
  Description of Artificial Sequence: Synthetic oligonucleotide
tgatgttgtggggtta

SEQ ID NO: 967 - DNA, 16 bp, Artificial Sequence
  Description of Artificial Sequence: Synthetic oligonucleotide
aggtatttcgcgatat

SEQ ID NO: 968 - DNA, 19 bp, Artificial Sequence
  Description of Artificial Sequence: Synthetic oligonucleotide
aggtattttgtgatatttt

SEQ ID NO: 969 - DNA, 17 bp, Artificial Sequence
  Description of Artificial Sequence: Synthetic oligonucleotide
gtttttcgatttacgtt

SEQ ID NO: 970 - DNA, 19 bp, Artificial Sequence
  Description of Artificial Sequence: Synthetic oligonucleotide
taggttttttgatttatgt

SEQ ID NO: 971 - DNA, 18 bp, Artificial Sequence
  Description of Artificial Sequence: Synthetic oligonucleotide
ggtagtttcgattattta

SEQ ID NO: 972 - DNA, 18 bp, Artificial Sequence
  Description of Artificial Sequence: Synthetic oligonucleotide
ggtagttttgattattta

SEQ ID NO: 973 - DNA, 16 bp, Artificial Sequence
  Description of Artificial Sequence: Synthetic oligonucleotide
tagagtacggggcggg

SEQ ID NO: 974 - DNA, 16 bp, Artificial Sequence
  Description of Artificial Sequence: Synthetic oligonucleotide
tagagtatggggtggg

SEQ ID NO: 975 - DNA, 18 bp, Artificial Sequence
  Description of Artificial Sequence: Synthetic oligonucleotide
ttgtttagcggattttag

SEQ ID NO: 976 - DNA, 18 bp, Artificial Sequence
  Description of Artificial Sequence: Synthetic oligonucleotide
ttgtttagtggattttag

SEQ ID NO: 977 - DNA, 17 bp, Artificial Sequence
  Description of Artificial Sequence: Synthetic oligonucleotide
taggttcggttcgttat

SEQ ID NO: 978 - DNA, 18 bp, Artificial Sequence
  Description of Artificial Sequence: Synthetic oligonucleotide
taggtttggtttgttatt

SEQ ID NO: 979 - DNA, 18 bp, Artificial Sequence
  Description of Artificial Sequence: Synthetic oligonucleotide
tggtggtacgtagtttgg

SEQ ID NO: 980 - DNA, 16 bp, Artificial Sequence
  Description of Artificial Sequence: Synthetic oligonucleotide
tttggcgtagatcggt

SEQ ID NO: 981 - DNA, 16 bp, Artificial Sequence
  Description of Artificial Sequence: Synthetic oligonucleotide
tttggtgtagattggt

SEQ ID NO: 982 - DNA, 16 bp, Artificial Sequence
  Description of Artificial Sequence: Synthetic oligonucleotide
agtgttcgtcgtagtt

SEQ ID NO: 983 - DNA, 17 bp, Artificial Sequence
  Description of Artificial Sequence: Synthetic oligonucleotide
tgagtgtttgttgtagt

SEQ ID NO: 984 - DNA, 16 bp, Artificial Sequence
  Description of Artificial Sequence: Synthetic oligonucleotide
gtgtttagcgcggatt

SEQ ID NO: 985 - DNA, 17 bp, Artificial Sequence
  Description of Artificial Sequence: Synthetic oligonucleotide
ggtgtttagtgtggatt

SEQ ID NO: 986 - DNA, 17 bp, Artificial Sequence
  Description of Artificial Sequence: Synthetic oligonucleotide
ttcggttagtttcgtat

SEQ ID NO: 987 - DNA, 19 bp, Artificial Sequence
  Description of Artificial Sequence: Synthetic oligonucleotide
ttttggttagttttgtatt

SEQ ID NO: 988 - DNA, 18 bp, Artificial Sequence
  Description of Artificial Sequence: Synthetic oligonucleotide
gattcgtttgggtaacgt

SEQ ID NO: 989 - DNA, 18 bp, Artificial Sequence
  Description of Artificial Sequence: Synthetic oligonucleotide
gatttgtttgggtaatgt

SEQ ID NO: 990 - DNA, 17 bp, Artificial Sequence
  Description of Artificial Sequence: Synthetic oligonucleotide
gtcgaatttagtcgcgt

SEQ ID NO: 991 - DNA, 18 bp, Artificial Sequence
  Description of Artificial Sequence: Synthetic oligonucleotide
gttgaatttagttgtgta

SEQ ID NO: 992 - DNA, 16 bp, Artificial Sequence
  Description of Artificial Sequence: Synthetic oligonucleotide
aattcgcgagtttaga

SEQ ID NO: 993 - DNA, 18 bp, Artificial Sequence
  Description of Artificial Sequence: Synthetic oligonucleotide
aaaaatttgtgagtttag

SEQ ID NO: 994 - DNA, 18 bp, Artificial Sequence
  Description of Artificial Sequence: Synthetic oligonucleotide
tatatatacgtgtgggta

SEQ ID NO: 995 - DNA, 18 bp, Artificial Sequence
  Description of Artificial Sequence: Synthetic oligonucleotide
tatatatatgtgtgggta

SEQ ID NO: 996 - DNA, 16 bp, Artificial Sequence
  Description of Artificial Sequence: Synthetic oligonucleotide
tatgtagtcgcgtagt

SEQ ID NO: 997 - DNA, 18 bp, Artificial Sequence
  Description of Artificial Sequence: Synthetic oligonucleotide
tttatgtagttgtgtagt

SEQ ID NO: 998 - DNA, 18 bp, Artificial Sequence
  Description of Artificial Sequence: Synthetic oligonucleotide
agtgtatgcgtagaaggt

SEQ ID NO: 999 - DNA, 18 bp, Artificial Sequence
  Description of Artificial Sequence: Synthetic oligonucleotide
agtgtatgtgtagaaggt

SEQ ID NO: 1000 - DNA, 18 bp, Artificial Sequence
  Description of Artificial Sequence: Synthetic oligonucleotide
tttagatacgaaatgtta

SEQ ID NO: 1001 - DNA, 18 bp, Artificial Sequence
  Description of Artificial Sequence: Synthetic oligonucleotide
tttagatatgaaatgtta

SEQ ID NO: 1002 - DNA, 18 bp, Artificial Sequence
  Description of Artificial Sequence: Synthetic oligonucleotide
aagtaagtcgttgttgtt

SEQ ID NO: 1003 - DNA, 18 bp, Artificial Sequence
  Description of Artificial Sequence: Synthetic oligonucleotide
aagtaagttgttgttgtt

SEQ ID NO: 1004 - DNA, 16 bp, Artificial Sequence
  Description of Artificial Sequence: Synthetic oligonucleotide
tttcgtcggaggaatt

SEQ ID NO: 1005 - DNA, 17 bp, Artificial Sequence
  Description of Artificial Sequence: Synthetic oligonucleotide
gttttgttggaggaatt

SEQ ID NO: 1006 - DNA, 17 bp, Artificial Sequence
  Description of Artificial Sequence: Synthetic oligonucleotide
atcgttttgtcggacgg

SEQ ID NO: 1007 - DNA, 17 bp, Artificial Sequence
  Description of Artificial Sequence: Synthetic oligonucleotide
attgttttgttggatgg

SEQ ID NO: 1008 - DNA, 16 bp, Artificial Sequence
  Description of Artificial Sequence: Synthetic oligonucleotide
tgtcgcgatatatcga

SEQ ID NO: 1009 - DNA, 19 bp, Artificial Sequence
  Description of Artificial Sequence: Synthetic oligonucleotide
tttgttgtgatatattgat

SEQ ID NO: 1010 - DNA, 16 bp, Artificial Sequence
  Description of Artificial Sequence: Synthetic oligonucleotide
agcgtcgattaatcgt

SEQ ID NO: 1011 - DNA, 19 bp, Artificial Sequence
  Description of Artificial Sequence: Synthetic oligonucleotide
ttaagtgttgattaattgt

SEQ ID NO: 1012 - DNA, 16 bp, Artificial Sequence
  Description of Artificial Sequence: Synthetic oligonucleotide
ttcggtcgggtttaaa

SEQ ID NO: 1013 - DNA, 17 bp, Artificial Sequence
  Description of Artificial Sequence: Synthetic oligonucleotide
gtttggttgggtttaaa

SEQ ID NO: 1014 - DNA, 16 bp, Artificial Sequence
  Description of Artificial Sequence: Synthetic oligonucleotide
taatcgttagcggcgg

SEQ ID NO: 1015 - DNA, 17 bp, Artificial Sequence
  Description of Artificial Sequence: Synthetic oligonucleotide
ttaattgttagtggtgg

SEQ ID NO: 1016 - DNA, 17 bp, Artificial Sequence
  Description of Artificial Sequence: Synthetic oligonucleotide
ttaacgggtgggtacgt

SEQ ID NO: 1017 - DNA, 17 bp, Artificial Sequence
  Description of Artificial Sequence: Synthetic oligonucleotide
ttaatgggtgggtatgt

SEQ ID NO: 1018 - DNA, 17 bp, Artificial Sequence
  Description of Artificial Sequence: Synthetic oligonucleotide
aggtcgttggtattcgt

SEQ ID NO: 1019 - DNA, 17 bp, Artificial Sequence
  Description of Artificial Sequence: Synthetic oligonucleotide
aggttgttggtatttgt

SEQ ID NO: 1020 - DNA, 17 bp, Artificial Sequence
  Description of Artificial Sequence: Synthetic oligonucleotide
ttttcgagttttatcga

SEQ ID NO: 1021 - DNA, 18 bp, Artificial Sequence
  Description of Artificial Sequence: Synthetic oligonucleotide
tttgagttttattgaggt

SEQ ID NO: 1022 - DNA, 16 bp, Artificial Sequence
  Description of Artificial Sequence: Synthetic oligonucleotide
atagtcgtggtttcgt

SEQ ID NO: 1023 - DNA, 17 bp, Artificial Sequence
  Description of Artificial Sequence: Synthetic oligonucleotide
atagttgtggttttgtt

SEQ ID NO: 1024 - DNA, 16 bp, Artificial Sequence
  Description of Artificial Sequence: Synthetic oligonucleotide
tgacgggcgttttcga

SEQ ID NO: 1025 - DNA, 16 bp, Artificial Sequence
  Description of Artificial Sequence: Synthetic oligonucleotide
gatgggtgtttttgag

SEQ ID NO: 1026 - DNA, 16 bp, Artificial Sequence
  Description of Artificial Sequence: Synthetic oligonucleotide
taatgagcgcgttgta

SEQ ID NO: 1027 - DNA, 17 bp, Artificial Sequence
  Description of Artificial Sequence: Synthetic oligonucleotide
atgagtgtgttgtattt

SEQ ID NO: 1028 - DNA, 18 bp, Artificial Sequence
  Description of Artificial Sequence: Synthetic oligonucleotide
ttggttcgggaaaggtaa

SEQ ID NO: 1029 - DNA, 18 bp, Artificial Sequence
  Description of Artificial Sequence: Synthetic oligonucleotide
ttggtttgggaaaggtaa

SEQ ID NO: 1030 - DNA, 16 bp, Artificial Sequence
  Description of Artificial Sequence: Synthetic oligonucleotide
tttcggtgaatcggat

SEQ ID NO: 1031 - DNA, 17 bp, Artificial Sequence
  Description of Artificial Sequence: Synthetic oligonucleotide
tttttggtgaattggat

SEQ ID NO: 1032 - DNA, 16 bp, Artificial Sequence
  Description of Artificial Sequence: Synthetic oligonucleotide
ttcgtaaagtcgttgt

SEQ ID NO: 1033 - DNA, 18 bp, Artificial Sequence
  Description of Artificial Sequence: Synthetic oligonucleotide
ggttttttgtaaagttgt

SEQ ID NO: 1034 - DNA, 18 bp, Artificial Sequence
  Description of Artificial Sequence: Synthetic oligonucleotide
gtttagttagcgggtttt

SEQ ID NO: 1035 - DNA, 18 bp, Artificial Sequence
  Description of Artificial Sequence: Synthetic oligonucleotide
gtttagttagtgggtttt

SEQ ID NO: 1036 - DNA, 16 bp, Artificial Sequence
  Description of Artificial Sequence: Synthetic oligonucleotide
gggcgcgtacggttat

SEQ ID NO: 1037 - DNA, 16 bp, Artificial Sequence
  Description of Artificial Sequence: Synthetic oligonucleotide
agttgggtgtgtatgg

SEQ ID NO: 1038 - DNA, 16 bp, Artificial Sequence
  Description of Artificial Sequence: Synthetic oligonucleotide
ttatcgcgcgtggagg

SEQ ID NO: 1039 - DNA, 17 bp, Artificial Sequence
  Description of Artificial Sequence: Synthetic oligonucleotide
ttattgtgtgtggagga

SEQ ID NO: 1040 - DNA, 16 bp, Artificial Sequence
  Description of Artificial Sequence: Synthetic oligonucleotide
ggtgcgcgtagagaat

SEQ ID NO: 1041 - DNA, 17 bp, Artificial Sequence
  Description of Artificial Sequence: Synthetic oligonucleotide
ggtgtgtgtagagaata

SEQ ID NO: 1042 - DNA, 16 bp, Artificial Sequence
  Description of Artificial Sequence: Synthetic oligonucleotide
taagcgtatcgacgtt

SEQ ID NO: 1043 - DNA, 19 bp, Artificial Sequence
  Description of Artificial Sequence: Synthetic oligonucleotide
attttaagtgtattgatgt

SEQ ID NO: 1044 - DNA, 16 bp, Artificial Sequence
  Description of Artificial Sequence: Synthetic oligonucleotide
aaatatcgaacgggat

SEQ ID NO: 1045 - DNA, 18 bp, Artificial Sequence
  Description of Artificial Sequence: Synthetic oligonucleotide
attgaatgggatttagag

SEQ ID NO: 1046 - DNA, 18 bp, Artificial Sequence
  Description of Artificial Sequence: Synthetic oligonucleotide
ttagagttcgagtttata

SEQ ID NO: 1047 - DNA, 18 bp, Artificial Sequence
  Description of Artificial Sequence: Synthetic oligonucleotide
ttagagtttgagtttata

SEQ ID NO: 1048 - DNA, 16 bp, Artificial Sequence
  Description of Artificial Sequence: Synthetic oligonucleotide
ttaggcgcggattcgt

SEQ ID NO: 1049 - DNA, 16 bp, Artificial Sequence
  Description of Artificial Sequence: Synthetic oligonucleotide
taggtgtggatttgtt

SEQ ID NO: 1050 - DNA, 16 bp, Artificial Sequence
  Description of Artificial Sequence: Synthetic oligonucleotide
ttcgcgaagttacggg

SEQ ID NO: 1051 - DNA, 17 bp, Artificial Sequence
  Description of Artificial Sequence: Synthetic oligonucleotide
tttgtgaagttatgggt

SEQ ID NO: 1052 - DNA, 16 bp, Artificial Sequence
  Description of Artificial Sequence: Synthetic oligonucleotide
tatcggttcggagtta

SEQ ID NO: 1053 - DNA, 17 bp, Artificial Sequence
  Description of Artificial Sequence: Synthetic oligonucleotide
attggtttggagttaga

SEQ ID NO: 1054 - DNA, 16 bp, Artificial Sequence
  Description of Artificial Sequence: Synthetic oligonucleotide
aagtagcgtcgttatt

SEQ ID NO: 1055 - DNA, 18 bp, Artificial Sequence
  Description of Artificial Sequence: Synthetic oligonucleotide
aagtagtgttgttattga

SEQ ID NO: 1056 - DNA, 16 bp, Artificial Sequence
  Description of Artificial Sequence: Synthetic oligonucleotide
gtcgttcggaattcgt

SEQ ID NO: 1057 - DNA, 17 bp, Artificial Sequence
  Description of Artificial Sequence: Synthetic oligonucleotide
agttgtttggaatttgt

SEQ ID NO: 1058 - DNA, 16 bp, Artificial Sequence
  Description of Artificial Sequence: Synthetic oligonucleotide
tacgtggtcgagggtt

SEQ ID NO: 1059 - DNA, 16 bp, Artificial Sequence
  Description of Artificial Sequence: Synthetic oligonucleotide
tatgtggttgagggtt

SEQ ID NO: 1060 - DNA, 18 bp, Artificial Sequence
  Description of Artificial Sequence: Synthetic oligonucleotide
ggaagtttcgatggttta

SEQ ID NO: 1061 - DNA, 18 bp, Artificial Sequence
  Description of Artificial Sequence: Synthetic oligonucleotide
ggaagttttgatggttta

SEQ ID NO: 1062 - DNA, 17 bp, Artificial Sequence
  Description of Artificial Sequence: Synthetic oligonucleotide
ggcgttggtatcgttga

SEQ ID NO: 1063 - DNA, 17 bp, Artificial Sequence
  Description of Artificial Sequence: Synthetic oligonucleotide
ggtgttggtattgttga

SEQ ID NO: 1064 - DNA, 16 bp, Artificial Sequence
  Description of Artificial Sequence: Synthetic oligonucleotide
ttaagacgcgtttttt

SEQ ID NO: 1065 - DNA, 17 bp, Artificial Sequence
  Description of Artificial Sequence: Synthetic oligonucleotide
aagatgtgttttttgga

SEQ ID NO: 1066 - DNA, 16 bp, Artificial Sequence
  Description of Artificial Sequence: Synthetic oligonucleotide
ttttgtcgcgggaatt

SEQ ID NO: 1067 - DNA, 17 bp, Artificial Sequence
  Description of Artificial Sequence: Synthetic oligonucleotide
tttttgttgtgggaatt

SEQ ID NO: 1068 - DNA, 16 bp, Artificial Sequence
  Description of Artificial Sequence: Synthetic oligonucleotide
atacgtagattcggag

SEQ ID NO: 1069 - DNA, 17 bp, Artificial Sequence
  Description of Artificial Sequence: Synthetic oligonucleotide
tatgtagatttggaggt

SEQ ID NO: 1070 - DNA, 18 bp, Artificial Sequence
  Description of Artificial Sequence: Synthetic oligonucleotide
gaagtggtcgttagtttt

SEQ ID NO: 1071 - DNA, 19 bp, Artificial Sequence
  Description of Artificial Sequence: Synthetic oligonucleotide
gaagtggttgttagttttt

SEQ ID NO: 1072 - DNA, 18 bp, Artificial Sequence
  Description of Artificial Sequence: Synthetic oligonucleotide
aaggaattcgttttgtaa

SEQ ID NO: 1073 - DNA, 18 bp, Artificial Sequence
  Description of Artificial Sequence: Synthetic oligonucleotide
aaggaatttgttttgtaa

SEQ ID NO: 1074 - DNA, 18 bp, Artificial Sequence
  Description of Artificial Sequence: Synthetic oligonucleotide
aatgttttcgtgatgttg

SEQ ID NO: 1075 - DNA, 18 bp, Artificial Sequence
  Description of Artificial Sequence: Synthetic oligonucleotide
aatgtttttgtgatgttg

SEQ ID NO: 1076 - DNA, 16 bp, Artificial Sequence
  Description of Artificial Sequence: Synthetic oligonucleotide
taaaacgagggagcgt

SEQ ID NO: 1077 - DNA, 16 bp, Artificial Sequence
  Description of Artificial Sequence: Synthetic oligonucleotide
aaaatgagggagtgtt

SEQ ID NO: 1078 - DNA, 16 bp, Artificial Sequence
  Description of Artificial Sequence: Synthetic oligonucleotide
aggagtcggtttcgta

SEQ ID NO: 1079 - DNA, 16 bp, Artificial Sequence
  Description of Artificial Sequence: Synthetic oligonucleotide
aggagttggttttgta

SEQ ID NO: 1080 - DNA, 16 bp, Artificial Sequence
  Description of Artificial Sequence: Synthetic oligonucleotide
taaagcgcggatattt

SEQ ID NO: 1081 - DNA, 16 bp, Artificial Sequence
  Description of Artificial Sequence: Synthetic oligonucleotide
gggtaaagtgtggata

SEQ ID NO: 1082 - DNA, 16 bp, Artificial Sequence
  Description of Artificial Sequence: Synthetic oligonucleotide
tttgagcgggtatcga

SEQ ID NO: 1083 - DNA, 16 bp, Artificial Sequence
  Description of Artificial Sequence: Synthetic oligonucleotide
tgagtgggtattgagt

SEQ ID NO: 1084 - DNA, 16 bp, Artificial Sequence
  Description of Artificial Sequence: Synthetic oligonucleotide
tagagtcgaggggcgg

SEQ ID NO: 1085 - DNA, 16 bp, Artificial Sequence
  Description of Artificial Sequence: Synthetic oligonucleotide
tagagttgaggggtgg

SEQ ID NO: 1086 - DNA, 16 bp, Artificial Sequence
  Description of Artificial Sequence: Synthetic oligonucleotide
tttcgagggacggaag

SEQ ID NO: 1087 - DNA, 16 bp, Artificial Sequence
  Description of Artificial Sequence: Synthetic oligonucleotide
ttttgagggatggaag

SEQ ID NO: 1088 - DNA, 16 bp, Artificial Sequence
  Description of Artificial Sequence: Synthetic oligonucleotide
tatgttttcggcgaat

SEQ ID NO: 1089 - DNA, 16 bp, Artificial Sequence
  Description of Artificial Sequence: Synthetic oligonucleotide
ttttggtgaatgggga

SEQ ID NO: 1090 - DNA, 16 bp, Artificial Sequence
  Description of Artificial Sequence: Synthetic oligonucleotide
atagtcgaggagtcgt

SEQ ID NO: 1091 - DNA, 17 bp, Artificial Sequence
  Description of Artificial Sequence: Synthetic oligonucleotide
aatagttgaggagttgt

SEQ ID NO: 1092 - DNA, 18 bp, Artificial Sequence
  Description of Artificial Sequence: Synthetic oligonucleotide
atttgtttcgattaattt

SEQ ID NO: 1093 - DNA, 18 bp, Artificial Sequence
  Description of Artificial Sequence: Synthetic oligonucleotide
atttgttttgattaattt

SEQ ID NO: 1094 - DNA, 18 bp, Artificial Sequence
  Description of Artificial Sequence: Synthetic oligonucleotide
aatttgcgaacgtttggg

SEQ ID NO: 1095 - DNA, 18 bp, Artificial Sequence
  Description of Artificial Sequence: Synthetic oligonucleotide
aatttgtgaatgtttggg

SEQ ID NO: 1096 - DNA, 16 bp, Artificial Sequence
  Description of Artificial Sequence: Synthetic oligonucleotide
gtcgatgttttcggta

SEQ ID NO: 1097 - DNA, 17 bp, Artificial Sequence
  Description of Artificial Sequence: Synthetic oligonucleotide
ggttgatgtttttggta

SEQ ID NO: 1098 - DNA, 17 bp, Artificial Sequence
  Description of Artificial Sequence: Synthetic oligonucleotide
gagtttcgttatatcgt

SEQ ID NO: 1099 - DNA, 18 bp, Artificial Sequence
  Description of Artificial Sequence: Synthetic oligonucleotide
ggagttttgttatattgt

SEQ ID NO: 1100 - DNA, 16 bp, Artificial Sequence
  Description of Artificial Sequence: Synthetic oligonucleotide
tttttgcggttcgata

SEQ ID NO: 1101 - DNA, 18 bp, Artificial Sequence
  Description of Artificial Sequence: Synthetic oligonucleotide
aatttttgtggtttgata

SEQ ID NO: 1102 - DNA, 20 bp, Artificial Sequence
  Description of Artificial Sequence: Synthetic oligonucleotide
tacgttaaggttaacgtata

SEQ ID NO: 1103 - DNA, 20 bp, Artificial Sequence
  Description of Artificial Sequence: Synthetic oligonucleotide
tatgttaaggttaatgtata

SEQ ID NO: 1104 - DNA, 17 bp, Artificial Sequence
  Description of Artificial Sequence: Synthetic oligonucleotide
tgtttcgtcgttataat

SEQ ID NO: 1105 - DNA, 20 bp, Artificial Sequence
  Description of Artificial Sequence: Synthetic oligonucleotide
gttttgttgttataattaga

SEQ ID NO: 1106 - DNA, 16 bp, Artificial Sequence
  Description of Artificial Sequence: Synthetic oligonucleotide
ggcgtaggttacgatt

SEQ ID NO: 1107 - DNA, 16 bp, Artificial Sequence
  Description of Artificial Sequence: Synthetic oligonucleotide
ggggtgtaggttatga

SEQ ID NO: 1108 - DNA, 16 bp, Artificial Sequence
  Description of Artificial Sequence: Synthetic oligonucleotide
attcgttacggatcgt

SEQ ID NO: 1109 - DNA, 19 bp, Artificial Sequence
  Description of Artificial Sequence: Synthetic oligonucleotide
tttatttgttatggattgt

SEQ ID NO: 1110 - DNA, 16 bp, Artificial Sequence
  Description of Artificial Sequence: Synthetic oligonucleotide
agttttcggattcgaa

SEQ ID NO: 1111 - DNA, 17 bp, Artificial Sequence
  Description of Artificial Sequence: Synthetic oligonucleotide
agagtttttggatttga

SEQ ID NO: 1112 - DNA, 16 bp, Artificial Sequence
  Description of Artificial Sequence: Synthetic oligonucleotide
tatttcgaggtagcgg

SEQ ID NO: 1113 - DNA, 16 bp, Artificial Sequence
  Description of Artificial Sequence: Synthetic oligonucleotide
tttgaggtagtgggat

SEQ ID NO: 1114 - DNA, 18 bp, Artificial Sequence
  Description of Artificial Sequence: Synthetic oligonucleotide
gagagaaacggtttttgt

SEQ ID NO: 1115 - DNA, 18 bp, Artificial Sequence
  Description of Artificial Sequence: Synthetic oligonucleotide
gagagaaatggtttttgt

SEQ ID NO: 1116 - DNA, 17 bp, Artificial Sequence
  Description of Artificial Sequence: Synthetic oligonucleotide
gtttgatggatgttttt

SEQ ID NO: 1117 - DNA, 16 bp, Artificial Sequence
  Description of Artificial Sequence: Synthetic oligonucleotide
gtacgacggtaaggat

SEQ ID NO: 1118 - DNA, 18 bp, Artificial Sequence
  Description of Artificial Sequence: Synthetic oligonucleotide
gtatgatggtaaggatta

SEQ ID NO: 1119 - DNA, 18 bp, Artificial Sequence
  Description of Artificial Sequence: Synthetic oligonucleotide
agttgtttcgtagatatt

SEQ ID NO: 1120 - DNA, 18 bp, Artificial Sequence
  Description of Artificial Sequence: Synthetic oligonucleotide
agttgttttgtagatatt

SEQ ID NO: 1121 - DNA, 17 bp, Artificial Sequence
  Description of Artificial Sequence: Synthetic oligonucleotide
agtaagcggttgtatat

SEQ ID NO: 1122 - DNA, 18 bp, Artificial Sequence
  Description of Artificial Sequence: Synthetic oligonucleotide
aaaagtaagtggttgtat

SEQ ID NO: 1123 - DNA, 17 bp, Artificial Sequence
  Description of Artificial Sequence: Synthetic oligonucleotide
aaattgagcgtttatgt

SEQ ID NO: 1124 - DNA, 18 bp, Artificial Sequence
  Description of Artificial Sequence: Synthetic oligonucleotide
attgagtgtttatgtgta

SEQ ID NO: 1125 - DNA, 16 bp, Artificial Sequence
  Description of Artificial Sequence: Synthetic oligonucleotide
ttgaagtcggtacggt

SEQ ID NO: 1126 - DNA, 16 bp, Artificial Sequence
  Description of Artificial Sequence: Synthetic oligonucleotide
tgaagttggtatggtt

SEQ ID NO: 1127 - DNA, 16 bp, Artificial Sequence
  Description of Artificial Sequence: Synthetic oligonucleotide
tgggacgcggatattt

SEQ ID NO: 1128 - DNA, 16 bp, Artificial Sequence
  Description of Artificial Sequence: Synthetic oligonucleotide
gttgggatgtggatat

SEQ ID NO: 1129 - DNA, 16 bp, Artificial Sequence
  Description of Artificial Sequence: Synthetic oligonucleotide
taaagtttcgaagcgg

SEQ ID NO: 1130 - DNA, 16 bp, Artificial Sequence
  Description of Artificial Sequence: Synthetic oligonucleotide
agttttgaagtggagt

SEQ ID NO: 1131 - DNA, 17 bp, Artificial Sequence
  Description of Artificial Sequence: Synthetic oligonucleotide
aagtcggtagttatcgt

SEQ ID NO: 1132 - DNA, 18 bp, Artificial Sequence
  Description of Artificial Sequence: Synthetic oligonucleotide
aagttggtagttattgtt

SEQ ID NO: 1133 - DNA, 16 bp, Artificial Sequence
  Description of Artificial Sequence: Synthetic oligonucleotide
gaggcgcgttattttt

SEQ ID NO: 1134 - DNA, 17 bp, Artificial Sequence
  Description of Artificial Sequence: Synthetic oligonucleotide
gggaggtgtgttatttt

SEQ ID NO: 1135 - DNA, 17 bp, Artificial Sequence
  Description of Artificial Sequence: Synthetic oligonucleotide
aacggtagttagcgata

SEQ ID NO: 1136 - DNA, 17 bp, Artificial Sequence
  Description of Artificial Sequence: Synthetic oligonucleotide
tgaatggtagttagtga

SEQ ID NO: 1137 - DNA, 16 bp, Artificial Sequence
  Description of Artificial Sequence: Synthetic oligonucleotide
ttttaacgttcgcgga

SEQ ID NO: 1138 - DNA, 16 bp, Artificial Sequence
  Description of Artificial Sequence: Synthetic oligonucleotide
aatgtttgtggaggat

SEQ ID NO: 1139 - DNA, 17 bp, Artificial Sequence
  Description of Artificial Sequence: Synthetic oligonucleotide
tttttcgcgtatatgtt

SEQ ID NO: 1140 - DNA, 21 bp, Artificial Sequence
  Description of Artificial Sequence: Synthetic oligonucleotide
ttttttgtgtatatgtttagg

SEQ ID NO: 1141 - DNA, 16 bp, Artificial Sequence
  Description of Artificial Sequence: Synthetic oligonucleotide
aagggcggtaagacgg

SEQ ID NO: 1142 - DNA, 16 bp, Artificial Sequence
  Description of Artificial Sequence: Synthetic oligonucleotide
aagggtggtaagatgg

SEQ ID NO: 1143 - DNA, 16 bp, Artificial Sequence
  Description of Artificial Sequence: Synthetic oligonucleotide
ttaggtcggacgtaag

SEQ ID NO: 1144 - DNA, 16 bp, Artificial Sequence
  Description of Artificial Sequence: Synthetic oligonucleotide
ggttaggttggatgta

SEQ ID NO: 1145 - DNA, 16 bp, Artificial Sequence
  Description of Artificial Sequence: Synthetic oligonucleotide
aggggttcgattaggg

SEQ ID NO: 1146 - DNA, 16 bp, Artificial Sequence
  Description of Artificial Sequence: Synthetic oligonucleotide
aggggtttgattaggg

SEQ ID NO: 1147 - DNA, 20 bp, Artificial Sequence
  Description of Artificial Sequence: Synthetic oligonucleotide
ttaggtatacgaaagagtat

SEQ ID NO: 1148 - DNA, 20 bp, Artificial Sequence
  Description of Artificial Sequence: Synthetic oligonucleotide
ttaggtatatgaaagagtat

SEQ ID NO: 1149 - DNA, 16 bp, Artificial Sequence
  Description of Artificial Sequence: Synthetic oligonucleotide
tgtcgtacgttatgtt

SEQ ID NO: 1150 - DNA, 17 bp, Artificial Sequence
  Description of Artificial Sequence: Synthetic oligonucleotide
ggtgttgtatgttatgt

SEQ ID NO: 1151 - DNA, 16 bp, Artificial Sequence
  Description of Artificial Sequence: Synthetic oligonucleotide
ttgattggcggacgag

SEQ ID NO: 1152 - DNA, 16 bp, Artificial Sequence
  Description of Artificial Sequence: Synthetic oligonucleotide
ttgattggtggatgag

SEQ ID NO: 1153 - DNA, 16 bp, Artificial Sequence
  Description of Artificial Sequence: Synthetic oligonucleotide
aaaacgtggacgtttt

SEQ ID NO: 1154 - DNA, 18 bp, Artificial Sequence
  Description of Artificial Sequence: Synthetic oligonucleotide
atttggagcgaggaattt

SEQ ID NO: 1155 - DNA, 18 bp, Artificial Sequence
  Description of Artificial Sequence: Synthetic oligonucleotide
atttggagtgaggaattt

SEQ ID NO: 1156 - DNA, 18 bp, Artificial Sequence
  Description of Artificial Sequence: Synthetic oligonucleotide
ttgaaagtcggttaaagt

SEQ ID NO: 1157 - DNA, 18 bp, Artificial Sequence
  Description of Artificial Sequence: Synthetic oligonucleotide
ttgaaagttggttaaagt

SEQ ID NO: 1158 - DNA, 18 bp, Artificial Sequence
  Description of Artificial Sequence: Synthetic oligonucleotide
ggtagttacgagagagtt

SEQ ID NO: 1159 - DNA, 18 bp, Artificial Sequence
  Description of Artificial Sequence: Synthetic oligonucleotide
ggtagttatgagagagtt

SEQ ID NO: 1160 - DNA, 22 bp, Artificial Sequence
  Description of Artificial Sequence: Synthetic oligonucleotide
gagattggagtttaattttgga

SEQ ID NO: 1161 - DNA, 17 bp, Artificial Sequence
  Description of Artificial Sequence: Synthetic oligonucleotide
catcccttccacccaac

SEQ ID NO: 1162 - DNA, 19 bp, Artificial Sequence
  Description of Artificial Sequence: Synthetic oligonucleotide
ggatcgtatagacgttcgt

SEQ ID NO: 1163 - DNA, 17 bp, Artificial Sequence
  Description of Artificial Sequence: Synthetic oligonucleotide
aggttgggtggaaggga

SEQ ID NO: 1164 - DNA, 25 bp, Artificial Sequence
  Description of Artificial Sequence: Synthetic oligonucleotide
aattttggattgtatagatgtttgt

SEQ ID NO: 1165 - DNA, 15 bp, Artificial Sequence
  Description of Artificial Sequence: Synthetic oligonucleotide
cccttccacccaacc

SEQ ID NO: 1166 - DNA, 16 bp, Artificial Sequence
  Description of Artificial Sequence: Synthetic oligonucleotide
atcccttccacccaac

SEQ ID NO: 1167 - DNA, 16 bp, Artificial Sequence
  Description of Artificial Sequence: Synthetic oligonucleotide
tcccttccacccaacc

SEQ ID NO: 1168 - DNA, 22 bp, Artificial Sequence
  Description of Artificial Sequence: Synthetic oligonucleotide
agagattggagtttaattttgg

SEQ ID NO: 1169 - DNA, 22 bp, Artificial Sequence
  Description of Artificial Sequence: Synthetic oligonucleotide
agattggagtttaattttggat

SEQ ID NO: 1170 - DNA, 23 bp, Artificial Sequence
  Description of Artificial Sequence: Synthetic oligonucleotide
tagagattggagtttaattttgg

SEQ ID NO: 1171 - DNA, 26 bp, Artificial Sequence
  Description of Artificial Sequence: Synthetic oligonucleotide
taattttggattgtatagatgtttgt

SEQ ID NO: 1172 - DNA, 27 bp, Artificial Sequence
  Description of Artificial Sequence: Synthetic oligonucleotide
ttaattttggattgtatagatgtttgt

SEQ ID NO: 1173 - DNA, 28 bp, Artificial Sequence
  Description of Artificial Sequence: Synthetic oligonucleotide
tttaattttggattgtatagatgtttgt

SEQ ID NO: 1174 - DNA, 24 bp, Artificial Sequence
  Description of Artificial Sequence: Synthetic oligonucleotide
ttggattgtatagatgtttgttga

SEQ ID NO: 1175 - DNA, 23 bp, Artificial Sequence
  Description of Artificial Sequence: Synthetic oligonucleotide
gagattggagtttaattttggat

SEQ ID NO: 1176 - DNA, 25 bp, Artificial Sequence
  Description of Artificial Sequence: Synthetic oligonucleotide
tttggattgtatagatgtttgttga

SEQ ID NO: 1177 - DNA, 25 bp, Artificial Sequence
  Description of Artificial Sequence: Synthetic oligonucleotide
ttggattgtatagatgtttgttgat

SEQ ID NO: 1178 - DNA, 26 bp, Artificial Sequence
  Description of Artificial Sequence: Synthetic oligonucleotide
ttggattgtatagatgtttgttgata

SEQ ID NO: 1179 - DNA, 26 bp, Artificial Sequence
  Description of Artificial Sequence: Synthetic oligonucleotide
tttggattgtatagatgtttgttgat

SEQ ID NO: 1180 - DNA, 26 bp, Artificial Sequence
  Description of Artificial Sequence: Synthetic oligonucleotide
ttttggattgtatagatgtttgttga

SEQ ID NO: 1181 - DNA, 27 bp, Artificial Sequence
  Description of Artificial Sequence: Synthetic oligonucleotide
tttggattgtatagatgtttgttgata

SEQ ID NO: 1182 - DNA, 27 bp, Artificial Sequence
  Description of Artificial Sequence: Synthetic oligonucleotide
ttggattgtatagatgtttgttgataa

SEQ ID NO: 1183 - DNA, 27 bp, Artificial Sequence
  Description of Artificial Sequence: Synthetic oligonucleotide
attttggattgtatagatgtttgttga

SEQ ID NO: 1184 - DNA, 28 bp, Artificial Sequence
  Description of Artificial Sequence: Synthetic oligonucleotide
tttggattgtatagatgtttgttgataa

SEQ ID NO: 1185 - DNA, 28 bp, Artificial Sequence
  Description of Artificial Sequence: Synthetic oligonucleotide
aattttggattgtatagatgtttgttga

SEQ ID NO: 1186 - DNA, 28 bp, Artificial Sequence
  Description of Artificial Sequence: Synthetic oligonucleotide
ttggattgtatagatgtttgttgataat

SEQ ID NO: 1187 - DNA, 29 bp, Artificial Sequence
  Description of Artificial Sequence: Synthetic oligonucleotide
aattttggattgtatagatgtttgttgat

SEQ ID NO: 1188 - DNA, 29 bp, Artificial Sequence
  Description of Artificial Sequence: Synthetic oligonucleotide
ttttggattgtatagatgtttgttgataa

SEQ ID NO: 1189 - DNA, 29 bp, Artificial Sequence
  Description of Artificial Sequence: Synthetic oligonucleotide
taattttggattgtatagatgtttgttga

SEQ ID NO: 1190 - DNA, 29 bp, Artificial Sequence
  Description of Artificial Sequence: Synthetic oligonucleotide
ttggattgtatagatgtttgttgataatt

SEQ ID NO: 1191 - DNA, 29 bp, Artificial Sequence
  Description of Artificial Sequence: Synthetic oligonucleotide
tttggattgtatagatgtttgttgataat

SEQ ID NO: 1192 - DNA, 30 bp, Artificial Sequence
  Description of Artificial Sequence: Synthetic oligonucleotide
aattttggattgtatagatgtttgttgata

SEQ ID NO: 1193 - DNA, 30 bp, Artificial Sequence
  Description of Artificial Sequence: Synthetic oligonucleotide
taattttggattgtatagatgtttgttgat

SEQ ID NO: 1194 - DNA, 30 bp, Artificial Sequence
  Description of Artificial Sequence: Synthetic oligonucleotide
ttggattgtatagatgtttgttgataattt

SEQ ID NO: 1195 - DNA, 30 bp, Artificial Sequence
  Description of Artificial Sequence: Synthetic oligonucleotide
ttaattttggattgtatagatgtttgttga

SEQ ID NO: 1196 - DNA, 30 bp, Artificial Sequence
  Description of Artificial Sequence: Synthetic oligonucleotide
tttggattgtatagatgtttgttgataatt

SEQ ID NO: 1197 - DNA, 30 bp, Artificial Sequence
  Description of Artificial Sequence: Synthetic oligonucleotide
ttttggattgtatagatgtttgttgataat

SEQ ID NO: 1198 - DNA, 30 bp, Artificial Sequence
  Description of Artificial Sequence: Synthetic oligonucleotide
attttggattgtatagatgtttgttgataa

SEQ ID NO: 1199 - DNA, 26 bp, Artificial Sequence
  Description of Artificial Sequence: Synthetic oligonucleotide
ttctttaccttcttaaatcaacacta

SEQ ID NO: 1200 - DNA, 22 bp, Artificial Sequence
  Description of Artificial Sequence: Synthetic oligonucleotide
tggggaatgtgataggtagtag

SEQ ID NO: 1201 - DNA, 17 bp, Artificial Sequence
  Description of Artificial Sequence: Synthetic oligonucleotide
acgaaacgattaccgac

SEQ ID NO: 1202 - DNA, 19 bp, Artificial Sequence
  Description of Artificial Sequence: Synthetic oligonucleotide
taaacctactacctatcac

SEQ ID NO: 1203 - DNA, 23 bp, Artificial Sequence
  Description of Artificial Sequence: Synthetic oligonucleotide
acactacaaaacaattaccaact

SEQ ID NO: 1204 - DNA, 23 bp, Artificial Sequence
  Description of Artificial Sequence: Synthetic oligonucleotide
gggaatgtgataggtagtaggtt

SEQ ID NO: 1205 - DNA, 22 bp, Artificial Sequence
  Description of Artificial Sequence: Synthetic oligonucleotide
ggggaatgtgataggtagtagg

SEQ ID NO: 1206 - DNA, 22 bp, Artificial Sequence
  Description of Artificial Sequence: Synthetic oligonucleotide
gttggggaatgtgataggtagt

SEQ ID NO: 1207 - DNA, 20 bp, Artificial Sequence
  Description of Artificial Sequence: Synthetic oligonucleotide
ttggggaatgtgataggtag

SEQ ID NO: 1208 - DNA, 18 bp, Artificial Sequence
  Description of Artificial Sequence: Synthetic oligonucleotide
actacctatcacattccc

SEQ ID NO: 1209 - DNA, 22 bp, Artificial Sequence
  Description of Artificial Sequence: Synthetic oligonucleotide
ggaatgtgataggtagtaggtt

SEQ ID NO: 1210 - DNA, 22 bp, Artificial Sequence
  Description of Artificial Sequence: Synthetic oligonucleotide
atagggttggggaatgtgatag

SEQ ID NO: 1211 - DNA, 17 bp, Artificial Sequence
  Description of Artificial Sequence: Synthetic oligonucleotide
cctatcacattccccaa

SEQ ID NO: 1212 - DNA, 22 bp, Artificial Sequence
  Description of Artificial Sequence: Synthetic oligonucleotide
ggttggggaatgtgataggtag

SEQ ID NO: 1213 - DNA, 20 bp, Artificial Sequence
  Description of Artificial Sequence: Synthetic oligonucleotide
tagggttggggaatgtgata

SEQ ID NO: 1214 - DNA, 18 bp, Artificial Sequence
  Description of Artificial Sequence: Synthetic oligonucleotide
gggttggggaatgtgata

SEQ ID NO: 1215 - DNA, 19 bp, Artificial Sequence
  Description of Artificial Sequence: Synthetic oligonucleotide
agggttggggaatgtgata

SEQ ID NO: 1216 - DNA, 25 bp, Artificial Sequence
  Description of Artificial Sequence: Synthetic oligonucleotide
gaatgtgataggtagtaggtttatt

SEQ ID NO: 1217 - DNA, 21 bp, Artificial Sequence
  Description of Artificial Sequence: Synthetic oligonucleotide
aataaaaatccaccaacaaac

SEQ ID NO: 1218 - DNA, 24 bp, Artificial Sequence
  Description of Artificial Sequence: Synthetic oligonucleotide
aatgtgataggtagtaggtttatt

SEQ ID NO: 1219 - DNA, 25 bp, Artificial Sequence
  Description of Artificial Sequence: Synthetic oligonucleotide
tctttaccttcttaaatcaacacta

SEQ ID NO: 1220 - DNA, 24 bp, Artificial Sequence
  Description of Artificial Sequence: Synthetic oligonucleotide
ctttaccttcttaaatcaacacta

SEQ ID NO: 1221 - DNA, 23 bp, Artificial Sequence
  Description of Artificial Sequence: Synthetic oligonucleotide
tttaccttcttaaatcaacacta

SEQ ID NO: 1222 - DNA, 27 bp, Artificial Sequence
  Description of Artificial Sequence: Synthetic oligonucleotide
tttctttaccttcttaaatcaacacta

SEQ ID NO: 1223 - DNA, 28 bp, Artificial Sequence
  Description of Artificial Sequence: Synthetic oligonucleotide
ttttctttaccttcttaaatcaacacta

SEQ ID NO: 1224 - DNA, 29 bp, Artificial Sequence
  Description of Artificial Sequence: Synthetic oligonucleotide
attttctttaccttcttaaatcaacacta

SEQ ID NO: 1225 - DNA, 30 bp, Artificial Sequence
  Description of Artificial Sequence: Synthetic oligonucleotide
aattttctttaccttcttaaatcaacacta

SEQ ID NO: 1226 - DNA, 31 bp, Artificial Sequence
  Description of Artificial Sequence: Synthetic oligonucleotide
taattttctttaccttcttaaatcaacacta

SEQ ID NO: 1227 - DNA, 25 bp, Artificial Sequence
  Description of Artificial Sequence: Synthetic oligonucleotide
ttctttaccttcttaaatcaacact

SEQ ID NO: 1228 - DNA, 24 bp, Artificial Sequence
  Description of Artificial Sequence: Synthetic oligonucleotide
aacactacaaaacaattaccaact

SEQ ID NO: 1229 - DNA, 24 bp, Artificial Sequence
  Description of Artificial Sequence: Synthetic oligonucleotide
tctttaccttcttaaatcaacact

SEQ ID NO: 1230 - DNA, 23 bp, Artificial Sequence
  Description of Artificial Sequence: Synthetic oligonucleotide
ctttaccttcttaaatcaacact

SEQ ID NO: 1231 - DNA, 22 bp, Artificial Sequence
  Description of Artificial Sequence: Synthetic oligonucleotide
tttaccttcttaaatcaacact

SEQ ID NO: 1232 - DNA, 26 bp, Artificial Sequence
  Description of Artificial Sequence: Synthetic oligonucleotide
tttctttaccttcttaaatcaacact

SEQ ID NO: 1233 - DNA, 27 bp, Artificial Sequence
  Description of Artificial Sequence: Synthetic oligonucleotide
ttttctttaccttcttaaatcaacact

SEQ ID NO: 1234 - DNA, 28 bp, Artificial Sequence
  Description of Artificial Sequence: Synthetic oligonucleotide
attttctttaccttcttaaatcaacact

SEQ ID NO: 1235 - DNA, 29 bp, Artificial Sequence
  Description of Artificial Sequence: Synthetic oligonucleotide
aattttctttaccttcttaaatcaacact

SEQ ID NO: 1236 - DNA, 30 bp, Artificial Sequence
  Description of Artificial Sequence: Synthetic oligonucleotide
taattttctttaccttcttaaatcaacact

SEQ ID NO: 1237 - DNA, 31 bp, Artificial Sequence
  Description of Artificial Sequence: Synthetic oligonucleotide
ctaattttctttaccttcttaaatcaacact

SEQ ID NO: 1238 - DNA, 24 bp, Artificial Sequence
  Description of Artificial Sequence: Synthetic oligonucleotide
acactacaaaacaattaccaacta

SEQ ID NO: 1239 - DNA, 25 bp, Artificial Sequence
  Description of Artificial Sequence: Synthetic oligonucleotide
acactacaaaacaattaccaactaa

SEQ ID NO: 1240 - DNA, 25 bp, Artificial Sequence
  Description of Artificial Sequence: Synthetic oligonucleotide
tcaacactacaaaacaattaccaac

SEQ ID NO: 1241 - DNA, 25 bp, Artificial Sequence
  Description of Artificial Sequence: Synthetic oligonucleotide
tttctttaccttcttaaatcaacac

SEQ ID NO: 1242 - DNA, 26 bp, Artificial Sequence
  Description of Artificial Sequence: Synthetic oligonucleotide
ttttctttaccttcttaaatcaacac

SEQ ID NO: 1243 - DNA, 27 bp, Artificial Sequence
  Description of Artificial Sequence: Synthetic oligonucleotide
attttctttaccttcttaaatcaacac

SEQ ID NO: 1244 - DNA, 28 bp, Artificial Sequence
  Description of Artificial Sequence: Synthetic oligonucleotide
aattttctttaccttcttaaatcaacac

SEQ ID NO: 1245 - DNA, 29 bp, Artificial Sequence
  Description of Artificial Sequence: Synthetic oligonucleotide
taattttctttaccttcttaaatcaacac

SEQ ID NO: 1246 - DNA, 30 bp, Artificial Sequence
  Description of Artificial Sequence: Synthetic oligonucleotide
ctaattttctttaccttcttaaatcaacac

SEQ ID NO: 1247 - DNA, 26 bp, Artificial Sequence
  Description of Artificial Sequence: Synthetic oligonucleotide
tcaacactacaaaacaattaccaact

SEQ ID NO: 1248 - DNA, 26 bp, Artificial Sequence
  Description of Artificial Sequence: Synthetic oligonucleotide
atcaacactacaaaacaattaccaac

SEQ ID NO: 1249 - DNA, 24 bp, Artificial Sequence
  Description of Artificial Sequence: Synthetic oligonucleotide
ttttctttaccttcttaaatcaac

SEQ ID NO: 1250 - DNA, 25 bp, Artificial Sequence
  Description of Artificial Sequence: Synthetic oligonucleotide
attttctttaccttcttaaatcaac

SEQ ID NO: 1251 - DNA, 26 bp, Artificial Sequence
  Description of Artificial Sequence: Synthetic oligonucleotide
aattttctttaccttcttaaatcaac

SEQ ID NO: 1252 - DNA, 27 bp, Artificial Sequence
  Description of Artificial Sequence: Synthetic oligonucleotide
taattttctttaccttcttaaatcaac

SEQ ID NO: 1253 - DNA, 28 bp, Artificial Sequence
  Description of Artificial Sequence: Synthetic oligonucleotide
ctaattttctttaccttcttaaatcaac

SEQ ID NO: 1254 - DNA, 29 bp, Artificial Sequence
  Description of Artificial Sequence: Synthetic oligonucleotide
cctaattttctttaccttcttaaatcaac

SEQ ID NO: 1255 - DNA, 27 bp, Artificial Sequence
  Description of Artificial Sequence: Synthetic oligonucleotide
atcaacactacaaaacaattaccaact

SEQ ID NO: 1256 - DNA, 32 bp, Artificial Sequence
  Description of Artificial Sequence: Synthetic oligonucleotide
tcttaaatcaacactacaaaacaattaccaac

SEQ ID NO: 1257 - DNA, 24 bp, Artificial Sequence
  Description of Artificial Sequence: Synthetic oligonucleotide
aattttctttaccttcttaaatca

SEQ ID NO: 1258 - DNA, 23 bp, Artificial Sequence
  Description of Artificial Sequence: Synthetic oligonucleotide
tttctttaccttcttaaatcaac

SEQ ID NO: 1259 - DNA, 26 bp, Artificial Sequence
  Description of Artificial Sequence: Synthetic oligonucleotide
cctaattttctttaccttcttaaatc

SEQ ID NO: 1260 - DNA, 22 bp, Artificial Sequence
  Description of Artificial Sequence: Synthetic oligonucleotide
ttctttaccttcttaaatcaac

SEQ ID NO: 1261 - DNA, 25 bp, Artificial Sequence
  Description of Artificial Sequence: Synthetic oligonucleotide
taattttctttaccttcttaaatca

SEQ ID NO: 1262 - DNA, 26 bp, Artificial Sequence
  Description of Artificial Sequence: Synthetic oligonucleotide
ctaattttctttaccttcttaaatca

SEQ ID NO: 1263 - DNA, 26 bp, Artificial Sequence
  Description of Artificial Sequence: Synthetic oligonucleotide
acctaattttctttaccttcttaaat

SEQ ID NO: 1264 - DNA, 24 bp, Artificial Sequence
  Description of Artificial Sequence: Synthetic oligonucleotide
ttctttaccttcttaaatcaacac

SEQ ID NO: 1265 - DNA, 33 bp, Artificial Sequence
  Description of Artificial Sequence: Synthetic oligonucleotide
ttaaatcaacactacaaaacaattaccaactaa

SEQ ID NO: 1266 - DNA, 23 bp, Artificial Sequence
  Description of Artificial Sequence: Synthetic oligonucleotide
tctttaccttcttaaatcaacac

SEQ ID NO: 1267 - DNA, 22 bp, Artificial Sequence
  Description of Artificial Sequence: Synthetic oligonucleotide
ctttaccttcttaaatcaacac

SEQ ID NO: 1268 - DNA, 33 bp, Artificial Sequence
  Description of Artificial Sequence: Synthetic oligonucleotide
cttaaatcaacactacaaaacaattaccaacta

SEQ ID NO: 1269 - DNA, 33 bp, Artificial Sequence
  Description of Artificial Sequence: Synthetic oligonucleotide
ttcttaaatcaacactacaaaacaattaccaac

SEQ ID NO: 1270 - DNA, 22 bp, Artificial Sequence
  Description of Artificial Sequence: Synthetic oligonucleotide
ttttctttaccttcttaaatca

SEQ ID NO: 1271 - DNA, 23 bp, Artificial Sequence
  Description of Artificial Sequence: Synthetic oligonucleotide
attttctttaccttcttaaatca

SEQ ID NO: 1272 - DNA, 21 bp, Artificial Sequence
  Description of Artificial Sequence: Synthetic oligonucleotide
acacccacttaaaatccctaa

SEQ ID NO: 1273 - DNA, 21 bp, Artificial Sequence
  Description of Artificial Sequence: Synthetic oligonucleotide
gttatatggggatggggaagt

SEQ ID NO: 1274 - DNA, 21 bp, Artificial Sequence
  Description of Artificial Sequence: Synthetic oligonucleotide
acgacgaataaaaaaacgctt

SEQ ID NO: 1275 - DNA, 16 bp, Artificial Sequence
  Description of Artificial Sequence: Synthetic oligonucleotide
cacaacctacttcccc

SEQ ID NO: 1276 - DNA, 33 bp, Artificial Sequence
  Description of Artificial Sequence: Synthetic oligonucleotide
ccctaacatatcttaaaaacacacaacaaataa

SEQ ID NO: 1277 - DNA, 20 bp, Artificial Sequence
  Description of Artificial Sequence: Synthetic oligonucleotide
tttttgttatatggggatgg

SEQ ID NO: 1278 - DNA, 19 bp, Artificial Sequence
  Description of Artificial Sequence: Synthetic oligonucleotide
tagtggtattgggggagag

SEQ ID NO: 1279 - DNA, 22 bp, Artificial Sequence
  Description of Artificial Sequence: Synthetic oligonucleotide
ttatatggggatggggaagtag

SEQ ID NO: 1280 - DNA, 19 bp, Artificial Sequence
  Description of Artificial Sequence: Synthetic oligonucleotide
tttgttatatggggatggg

SEQ ID NO: 1281 - DNA, 20 bp, Artificial Sequence
  Description of Artificial Sequence: Synthetic oligonucleotide
ttttgttatatggggatggg

SEQ ID NO: 1282 - DNA, 17 bp, Artificial Sequence
  Description of Artificial Sequence: Synthetic oligonucleotide
tggggatggggaagtag

SEQ ID NO: 1283 - DNA, 21 bp, Artificial Sequence
  Description of Artificial Sequence: Synthetic oligonucleotide
gtttttgttatatggggatgg

SEQ ID NO: 1284 - DNA, 22 bp, Artificial Sequence
  Description of Artificial Sequence: Synthetic oligonucleotide
aacacccacttaaaatccctaa

SEQ ID NO: 1285 - DNA, 20 bp, Artificial Sequence
  Description of Artificial Sequence: Synthetic oligonucleotide
cacccacttaaaatccctaa

SEQ ID NO: 1286 - DNA, 26 bp, Artificial Sequence
  Description of Artificial Sequence: Synthetic oligonucleotide
aatttaaggttgtttagatagataag

SEQ ID NO: 1287 - DNA, 22 bp, Artificial Sequence
  Description of Artificial Sequence: Synthetic oligonucleotide
accccactaaacaaactctaaa

SEQ ID NO: 1288 - DNA, 18 bp, Artificial Sequence
  Description of Artificial Sequence: Synthetic oligonucleotide
aagcgtttatcgtcgtat

SEQ ID NO: 1289 - DNA, 17 bp, Artificial Sequence
  Description of Artificial Sequence: Synthetic oligonucleotide
gttagagttagggaggt

SEQ ID NO: 1290 - DNA, 27 bp, Artificial Sequence
  Description of Artificial Sequence: Synthetic oligonucleotide
gatagataagtgtttattgttgtattg

SEQ ID NO: 1291 - DNA, 23 bp, Artificial Sequence
  Description of Artificial Sequence: Synthetic oligonucleotide
taccccactaaacaaactctaaa

SEQ ID NO: 1292 - DNA, 23 bp, Artificial Sequence
  Description of Artificial Sequence: Synthetic oligonucleotide
ataccccactaaacaaactctaa

SEQ ID NO: 1293 - DNA, 23 bp, Artificial Sequence
  Description of Artificial Sequence: Synthetic oligonucleotide
aataccccactaaacaaactcta

SEQ ID NO: 1294 - DNA, 21 bp, Artificial Sequence
  Description of Artificial Sequence: Synthetic oligonucleotide
ccccactaaacaaactctaaa

SEQ ID NO: 1295 - DNA, 22 bp, Artificial Sequence
  Description of Artificial Sequence: Synthetic oligonucleotide
ttaaataccccactaaacaaac

SEQ ID NO: 1296 - DNA, 24 bp, Artificial Sequence
  Description of Artificial Sequence: Synthetic oligonucleotide
aaataccccactaaacaaactcta

SEQ ID NO: 1297 - DNA, 22 bp, Artificial Sequence
  Description of Artificial Sequence: Synthetic oligonucleotide
taaataccccactaaacaaact

SEQ ID NO: 1298 - DNA, 19 bp, Artificial Sequence
  Description of Artificial Sequence: Synthetic oligonucleotide
cacctctctcacctatcca

SEQ ID NO: 1299 - DNA, 16 bp, Artificial Sequence
  Description of Artificial Sequence: Synthetic oligonucleotide
ggtggataggtgagag

SEQ ID NO: 1300 - DNA, 19 bp, Artificial Sequence
  Description of Artificial Sequence: Synthetic oligonucleotide
acctctctcacctatccac

SEQ ID NO: 1301 - DNA, 19 bp, Artificial Sequence
  Description of Artificial Sequence: Synthetic oligonucleotide
aacaaaaccattctcccaa

SEQ ID NO: 1302 - DNA, 19 bp, Artificial Sequence
  Description of Artificial Sequence: Synthetic oligonucleotide
acaaaaccattctcccaaa

SEQ ID NO: 1303 - DNA, 18 bp, Artificial Sequence
  Description of Artificial Sequence: Synthetic oligonucleotide
caaaaccattctcccaaa

SEQ ID NO: 1304 - DNA, 25 bp, Artificial Sequence
  Description of Artificial Sequence: Synthetic oligonucleotide
atttaaggttgtttagatagataag

SEQ ID NO: 1305 - DNA, 27 bp, Artificial Sequence
  Description of Artificial Sequence: Synthetic oligonucleotide
agatagataagtgtttattgttgtatt

SEQ ID NO: 1306 - DNA, 24 bp, Artificial Sequence
  Description of Artificial Sequence: Synthetic oligonucleotide
tctaaataacaaaatacctccatt

SEQ ID NO: 1307 - DNA, 21 bp, Artificial Sequence
  Description of Artificial Sequence: Synthetic oligonucleotide
gagagagagggttgaaattag

SEQ ID NO: 1308 - DNA, 16 bp, Artificial Sequence
  Description of Artificial Sequence: Synthetic oligonucleotide
ccattaccgacgcgac

SEQ ID NO: 1309 - DNA, 19 bp, Artificial Sequence
  Description of Artificial Sequence: Synthetic oligonucleotide
ctctaatttcaaccctctc

SEQ ID NO: 1310 - DNA, 20 bp, Artificial Sequence
  Description of Artificial Sequence: Synthetic oligonucleotide
cctccattaccaacacaacc

SEQ ID NO: 1311 - DNA, 20 bp, Artificial Sequence
  Description of Artificial Sequence: Synthetic oligonucleotide
agagagagggttgaaattag

SEQ ID NO: 1312 - DNA, 23 bp, Artificial Sequence
  Description of Artificial Sequence: Synthetic oligonucleotide
ctaaataacaaaatacctccatt

SEQ ID NO: 1313 - DNA, 23 bp, Artificial Sequence
  Description of Artificial Sequence: Synthetic oligonucleotide
aaataacaaaatacctccattac

SEQ ID NO: 1314 - DNA, 22 bp, Artificial Sequence
  Description of Artificial Sequence: Synthetic oligonucleotide
taaataacaaaatacctccatt

SEQ ID NO: 1315 - DNA, 20 bp, Artificial Sequence
  Description of Artificial Sequence: Synthetic oligonucleotide
acctccattaccaacacaac

SEQ ID NO: 1316 - DNA, 20 bp, Artificial Sequence
  Description of Artificial Sequence: Synthetic oligonucleotide
ctccattaccaacacaaccc

SEQ ID NO: 1317 - DNA, 21 bp, Artificial Sequence
  Description of Artificial Sequence: Synthetic oligonucleotide
tacctccattaccaacacaac

SEQ ID NO: 1318 - DNA, 21 bp, Artificial Sequence
  Description of Artificial Sequence: Synthetic oligonucleotide
cctccattaccaacacaaccc

SEQ ID NO: 1319 - DNA, 21 bp, Artificial Sequence
  Description of Artificial Sequence: Synthetic oligonucleotide
acctccattaccaacacaacc

SEQ ID NO: 1320 - DNA, 22 bp, Artificial Sequence
  Description of Artificial Sequence: Synthetic oligonucleotide
acctccattaccaacacaaccc

SEQ ID NO: 1321 - DNA, 22 bp, Artificial Sequence
  Description of Artificial Sequence: Synthetic oligonucleotide
tacctccattaccaacacaacc

SEQ ID NO: 1322 - DNA, 23 bp, Artificial Sequence
  Description of Artificial Sequence: Synthetic oligonucleotide
atacctccattaccaacacaacc

SEQ ID NO: 1323 - DNA, 22 bp, Artificial Sequence
  Description of Artificial Sequence: Synthetic oligonucleotide
aaataacaaaatacctccatta

SEQ ID NO: 1324 - DNA, 23 bp, Artificial Sequence
  Description of Artificial Sequence: Synthetic oligonucleotide
tacctccattaccaacacaaccc

SEQ ID NO: 1325 - DNA, 24 bp, Artificial Sequence
  Description of Artificial Sequence: Synthetic oligonucleotide
aatacctccattaccaacacaacc

SEQ ID NO: 1326 - DNA, 21 bp, Artificial Sequence
  Description of Artificial Sequence: Synthetic oligonucleotide
aaataacaaaatacctccatt

SEQ ID NO: 1327 - DNA, 24 bp, Artificial Sequence
  Description of Artificial Sequence: Synthetic oligonucleotide
atacctccattaccaacacaaccc

SEQ ID NO: 1328 - DNA, 25 bp, Artificial Sequence
  Description of Artificial Sequence: Synthetic oligonucleotide
aatacctccattaccaacacaaccc

SEQ ID NO: 1329 - DNA, 22 bp, Artificial Sequence
  Description of Artificial Sequence: Synthetic oligonucleotide
tctaaataacaaaatacctcca

SEQ ID NO: 1330 - DNA, 26 bp, Artificial Sequence
  Description of Artificial Sequence: Synthetic oligonucleotide
aaatacctccattaccaacacaaccc

SEQ ID NO: 1331 - DNA, 22 bp, Artificial Sequence
  Description of Artificial Sequence: Synthetic oligonucleotide
ctaaataacaaaatacctccat

SEQ ID NO: 1332 - DNA, 27 bp, Artificial Sequence
  Description of Artificial Sequence: Synthetic oligonucleotide
aaaatacctccattaccaacacaaccc

SEQ ID NO: 1333 - DNA, 25 bp, Artificial Sequence
  Description of Artificial Sequence: Synthetic oligonucleotide
tctaaataacaaaatacctccatta

SEQ ID NO: 1334 - DNA, 21 bp, Artificial Sequence
  Description of Artificial Sequence: Synthetic oligonucleotide
ccattaccaacacaacccacc

SEQ ID NO: 1335 - DNA, 24 bp, Artificial Sequence
  Description of Artificial Sequence: Synthetic oligonucleotide
ctaaataacaaaatacctccatta

SEQ ID NO: 1336 - DNA, 24 bp, Artificial Sequence
  Description of Artificial Sequence: Synthetic oligonucleotide
taaataacaaaatacctccattac

SEQ ID NO: 1337 - DNA, 22 bp, Artificial Sequence
  Description of Artificial Sequence: Synthetic oligonucleotide
tccattaccaacacaacccacc

SEQ ID NO: 1338 - DNA, 23 bp, Artificial Sequence
  Description of Artificial Sequence: Synthetic oligonucleotide
ctccattaccaacacaacccacc

SEQ ID NO: 1339 - DNA, 21 bp, Artificial Sequence
  Description of Artificial Sequence: Synthetic oligonucleotide
tttttaggggatttttgtaga

SEQ ID NO: 1340 - DNA, 21 bp, Artificial Sequence
  Description of Artificial Sequence: Synthetic oligonucleotide
tacccatacccaatactcaaa

SEQ ID NO: 1341 - DNA, 16 bp, Artificial Sequence
  Description of Artificial Sequence: Synthetic oligonucleotide
agatgcgtcgagcgta

SEQ ID NO: 1342 - DNA, 17 bp, Artificial Sequence
  Description of Artificial Sequence: Synthetic oligonucleotide
ggtggggagatgagata

SEQ ID NO: 1343 - DNA, 22 bp, Artificial Sequence
  Description of Artificial Sequence: Synthetic oligonucleotide
tgtagatgtgttgagtgtagtt

SEQ ID NO: 1344 - DNA, 21 bp, Artificial Sequence
  Description of Artificial Sequence: Synthetic oligonucleotide
acccatacccaatactcaaaa

SEQ ID NO: 1345 - DNA, 20 bp, Artificial Sequence
  Description of Artificial Sequence: Synthetic oligonucleotide
cccatacccaatactcaaaa

SEQ ID NO: 1346 - DNA, 18 bp, Artificial Sequence
  Description of Artificial Sequence: Synthetic oligonucleotide
tatctcatctccccaccc

SEQ ID NO: 1347 - DNA, 17 bp, Artificial Sequence
  Description of Artificial Sequence: Synthetic oligonucleotide
tgggtggggagatgaga

SEQ ID NO: 1348 - DNA, 17 bp, Artificial Sequence
  Description of Artificial Sequence: Synthetic oligonucleotide
atctcatctccccaccc

SEQ ID NO: 1349 - DNA, 20 bp, Artificial Sequence
  Description of Artificial Sequence: Synthetic oligonucleotide
ccatacccaatactcaaaaa

SEQ ID NO: 1350 - DNA, 17 bp, Artificial Sequence
  Description of Artificial Sequence: Synthetic oligonucleotide
ctcatctccccacccac

SEQ ID NO: 1351 - DNA, 19 bp, Artificial Sequence
  Description of Artificial Sequence: Synthetic oligonucleotide
aatttgatttcgtggtggg

SEQ ID NO: 1352 - DNA, 21 bp, Artificial Sequence
  Description of Artificial Sequence: Synthetic oligonucleotide
aaaacaaataatacccatacc

SEQ ID NO: 1353 - DNA, 15 bp, Artificial Sequence
  Description of Artificial Sequence: Synthetic oligonucleotide
tcatctccccaccca

SEQ ID NO: 1354 - DNA, 18 bp, Artificial Sequence
  Description of Artificial Sequence: Synthetic oligonucleotide
gtgggtggggagatgaga

SEQ ID NO: 1355 - DNA, 18 bp, Artificial Sequence
  Description of Artificial Sequence: Synthetic oligonucleotide
tctcatctccccacccac

SEQ ID NO: 1356 - DNA, 20 bp, Artificial Sequence
  Description of Artificial Sequence: Synthetic oligonucleotide
ttttaggggatttttgtaga

SEQ ID NO: 1357 - DNA, 19 bp, Artificial Sequence
  Description of Artificial Sequence: Synthetic oligonucleotide
tttaggggatttttgtaga

SEQ ID NO: 1358 - DNA, 22 bp, Artificial Sequence
  Description of Artificial Sequence: Synthetic oligonucleotide
ttgtagatgtgttgagtgtagt

SEQ ID NO: 1359 - DNA, 23 bp, Artificial Sequence
  Description of Artificial Sequence: Synthetic oligonucleotide
tttgtagatgtgttgagtgtagt

SEQ ID NO: 1360 - DNA, 23 bp, Artificial Sequence
  Description of Artificial Sequence: Synthetic oligonucleotide
ttttgtagatgtgttgagtgtag

SEQ ID NO: 1361 - DNA, 23 bp, Artificial Sequence
  Description of Artificial Sequence: Synthetic oligonucleotide
tttttgtagatgtgttgagtgta

SEQ ID NO: 1362 - DNA, 23 bp, Artificial Sequence
  Description of Artificial Sequence: Synthetic oligonucleotide
atttttgtagatgtgttgagtgt

SEQ ID NO: 1363 - DNA, 23 bp, Artificial Sequence
  Description of Artificial Sequence: Synthetic oligonucleotide
tgtagatgtgttgagtgtagttt

SEQ ID NO: 1364 - DNA, 24 bp, Artificial Sequence
  Description of Artificial Sequence: Synthetic oligonucleotide
atttttgtagatgtgttgagtgta

SEQ ID NO: 1365 - DNA, 24 bp, Artificial Sequence
  Description of Artificial Sequence: Synthetic oligonucleotide
gatttttgtagatgtgttgagtgt

SEQ ID NO: 1366 - DNA, 25 bp, Artificial Sequence
  Description of Artificial Sequence: Synthetic oligonucleotide
gatttttgtagatgtgttgagtgta

SEQ ID NO: 1367 - DNA, 25 bp, Artificial Sequence
  Description of Artificial Sequence: Synthetic oligonucleotide
atttttgtagatgtgttgagtgtag

SEQ ID NO: 1368 - DNA, 23 bp, Artificial Sequence
  Description of Artificial Sequence: Synthetic oligonucleotide
cctactaaaatccctacctataa

SEQ ID NO: 1369 - DNA, 22 bp, Artificial Sequence
  Description of Artificial Sequence: Synthetic oligonucleotide
atgatggaggttaattggttta

SEQ ID NO: 1370 - DNA, 22 bp, Artificial Sequence
  Description of Artificial Sequence: Synthetic oligonucleotide
acgtattcgctaaaatctcgct

SEQ ID NO: 1371 - DNA, 19 bp, Artificial Sequence
  Description of Artificial Sequence: Synthetic oligonucleotide
taaactcaacctacacaac

SEQ ID NO: 1372 - DNA, 28 bp, Artificial Sequence
  Description of Artificial Sequence: Synthetic oligonucleotide
ctataaacatattcactaaaatctcact

SEQ ID NO: 1373 - DNA, 22 bp, Artificial Sequence
  Description of Artificial Sequence: Synthetic oligonucleotide
gatggaggttaattggtttagt

SEQ ID NO: 1374 - DNA, 21 bp, Artificial Sequence
  Description of Artificial Sequence: Synthetic oligonucleotide
tgatggaggttaattggttta

SEQ ID NO: 1375 - DNA, 22 bp, Artificial Sequence
  Description of Artificial Sequence: Synthetic oligonucleotide
gatgatggaggttaattggttt

SEQ ID NO: 1376 - DNA, 21 bp, Artificial Sequence
  Description of Artificial Sequence: Synthetic oligonucleotide
atttggatgatggaggttaat

SEQ ID NO: 1377 - DNA, 22 bp, Artificial Sequence
  Description of Artificial Sequence: Synthetic oligonucleotide
taggagtatttttaggggtttt

SEQ ID NO: 1378 - DNA, 20 bp, Artificial Sequence
  Description of Artificial Sequence: Synthetic oligonucleotide
gtttatttggatgatggagg

SEQ ID NO: 1379 - DNA, 24 bp, Artificial Sequence
  Description of Artificial Sequence: Synthetic oligonucleotide
tggaggttaattggtttagtattt

SEQ ID NO: 1380 - DNA, 20 bp, Artificial Sequence
  Description of Artificial Sequence: Synthetic oligonucleotide
tttggatgatggaggttaat

SEQ ID NO: 1381 - DNA, 22 bp, Artificial Sequence
  Description of Artificial Sequence: Synthetic oligonucleotide
tgaagtaattgttgtgtaggtt

SEQ ID NO: 1382 - DNA, 21 bp, Artificial Sequence
  Description of Artificial Sequence: Synthetic oligonucleotide
atggaggttaattggtttagt

SEQ ID NO: 1383 - DNA, 22 bp, Artificial Sequence
  Description of Artificial Sequence: Synthetic oligonucleotide
tttgtttattgtttgaaaggta

SEQ ID NO: 1384 - DNA, 24 bp, Artificial Sequence
  Description of Artificial Sequence: Synthetic oligonucleotide
ggaggttaattggtttagtatttt

SEQ ID NO: 1385 - DNA, 20 bp, Artificial Sequence
  Description of Artificial Sequence: Synthetic oligonucleotide
tggatgatggaggttaattg

SEQ ID NO: 1386 - DNA, 23 bp, Artificial Sequence
  Description of Artificial Sequence: Synthetic oligonucleotide
atgaagtaattgttgtgtaggtt

SEQ ID NO: 1387 - DNA, 21 bp, Artificial Sequence
  Description of Artificial Sequence: Synthetic oligonucleotide
aggagtatttttaggggtttt

SEQ ID NO: 1388 - DNA, 22 bp, Artificial Sequence
  Description of Artificial Sequence: Synthetic oligonucleotide
tatttggatgatggaggttaat

SEQ ID NO: 1389 - DNA, 22 bp, Artificial Sequence
  Description of Artificial Sequence: Synthetic oligonucleotide
aattgttgtgtaggttgagttt

SEQ ID NO: 1390 - DNA, 21 bp, Artificial Sequence
  Description of Artificial Sequence: Synthetic oligonucleotide
ttggatgatggaggttaattg

SEQ ID NO: 1391 - DNA, 23 bp, Artificial Sequence
  Description of Artificial Sequence: Synthetic oligonucleotide
ggaggtatatgaagtaattgttg

SEQ ID NO: 1392 - DNA, 24 bp, Artificial Sequence
  Description of Artificial Sequence: Synthetic oligonucleotide
gaagtaattgttgtgtaggttgag

SEQ ID NO: 1393 - DNA, 22 bp, Artificial Sequence
  Description of Artificial Sequence: Synthetic oligonucleotide
ttgtttattgtttgaaaggtat

SEQ ID NO: 1394 - DNA, 24 bp, Artificial Sequence
  Description of Artificial Sequence: Synthetic oligonucleotide
tatgaagtaattgttgtgtaggtt

SEQ ID NO: 1395 - DNA, 21 bp, Artificial Sequence
  Description of Artificial Sequence: Synthetic oligonucleotide
ggtttatttggatgatggagg

SEQ ID NO: 1396 - DNA, 22 bp, Artificial Sequence
  Description of Artificial Sequence: Synthetic oligonucleotide
ggatgatggaggttaattggtt

SEQ ID NO: 1397 - DNA, 23 bp, Artificial Sequence
  Description of Artificial Sequence: Synthetic oligonucleotide
taattgttgtgtaggttgagttt

SEQ ID NO: 1398 - DNA, 24 bp, Artificial Sequence
  Description of Artificial Sequence: Synthetic oligonucleotide
gtaattgttgtgtaggttgagttt

SEQ ID NO: 1399 - DNA, 22 bp, Artificial Sequence
  Description of Artificial Sequence: Synthetic oligonucleotide
ttgttgtgtaggttgagtttag

SEQ ID NO: 1400 - DNA, 19 bp, Artificial Sequence
  Description of Artificial Sequence: Synthetic oligonucleotide
tctaaactcaacctacaca

SEQ ID NO: 1401 - DNA, 19 bp, Artificial Sequence
  Description of Artificial Sequence: Synthetic oligonucleotide
tttatttggatgatggagg

SEQ ID NO: 1402 - DNA, 24 bp, Artificial Sequence
  Description of Artificial Sequence: Synthetic oligonucleotide
gaggtatatgaagtaattgttgtg

SEQ ID NO: 1403 - DNA, 24 bp, Artificial Sequence
  Description of Artificial Sequence: Synthetic oligonucleotide
agtaattgttgtgtaggttgagtt

SEQ ID NO: 1404 - DNA, 24 bp, Artificial Sequence
  Description of Artificial Sequence: Synthetic oligonucleotide
aagtaattgttgtgtaggttgagt

SEQ ID NO: 1405 - DNA, 23 bp, Artificial Sequence
  Description of Artificial Sequence: Synthetic oligonucleotide
attgttgtgtaggttgagtttag

SEQ ID NO: 1406 - DNA, 21 bp, Artificial Sequence
  Description of Artificial Sequence: Synthetic oligonucleotide
aggtttatttggatgatggag

SEQ ID NO: 1407 - DNA, 21 bp, Artificial Sequence
  Description of Artificial Sequence: Synthetic oligonucleotide
ttatttggatgatggaggtta

SEQ ID NO: 1408 - DNA, 23 bp, Artificial Sequence
  Description of Artificial Sequence: Synthetic oligonucleotide
gaggttaattggtttagtatttt

SEQ ID NO: 1409 - DNA, 20 bp, Artificial Sequence
  Description of Artificial Sequence: Synthetic oligonucleotide
ggagtatttttaggggtttt

SEQ ID NO: 1410 - DNA, 25 bp, Artificial Sequence
  Description of Artificial Sequence: Synthetic oligonucleotide
atatgaagtaattgttgtgtaggtt

SEQ ID NO: 1411 - DNA, 25 bp, Artificial Sequence
  Description of Artificial Sequence: Synthetic oligonucleotide
aggtatatgaagtaattgttgtgta

SEQ ID NO: 1412 - DNA, 21 bp, Artificial Sequence
  Description of Artificial Sequence: Synthetic oligonucleotide
gaggtttatttggatgatgga

SEQ ID NO: 1413 - DNA, 20 bp, Artificial Sequence
  Description of Artificial Sequence: Synthetic oligonucleotide
ggaggtttatttggatgatg

SEQ ID NO: 1414 - DNA, 24 bp, Artificial Sequence
  Description of Artificial Sequence: Synthetic oligonucleotide
ggtatatgaagtaattgttgtgta

SEQ ID NO: 1415 - DNA, 26 bp, Artificial Sequence
  Description of Artificial Sequence: Synthetic oligonucleotide
tatatgaagtaattgttgtgtaggtt

SEQ ID NO: 1416 - DNA, 26 bp, Artificial Sequence
  Description of Artificial Sequence: Synthetic oligonucleotide
gtatatgaagtaattgttgtgtaggt

SEQ ID NO: 1417 - DNA, 21 bp, Artificial Sequence
  Description of Artificial Sequence: Synthetic oligonucleotide
tggaggtttatttggatgatg

SEQ ID NO: 1418 - DNA, 22 bp, Artificial Sequence
  Description of Artificial Sequence: Synthetic oligonucleotide
gtaggagtatttttaggggttt

SEQ ID NO: 1419 - DNA, 21 bp, Artificial Sequence
  Description of Artificial Sequence: Synthetic oligonucleotide
tgttgtgtaggttgagtttag

SEQ ID NO: 1420 - DNA, 24 bp, Artificial Sequence
  Description of Artificial Sequence: Synthetic oligonucleotide
tgtaggagtatttttaggggtttt

SEQ ID NO: 1421 - DNA, 26 bp, Artificial Sequence
  Description of Artificial Sequence: Synthetic oligonucleotide
tgtttattgtttgaaaggtataattg

SEQ ID NO: 1422 - DNA, 26 bp, Artificial Sequence
  Description of Artificial Sequence: Synthetic oligonucleotide
caacctactaaaatccctacctataa

SEQ ID NO: 1423 - DNA, 29 bp, Artificial Sequence
  Description of Artificial Sequence: Synthetic oligonucleotide
ctataaacatattcactaaaatctcactc

SEQ ID NO: 1424 - DNA, 29 bp, Artificial Sequence
  Description of Artificial Sequence: Synthetic oligonucleotide
cctataaacatattcactaaaatctcact

SEQ ID NO: 1425 - DNA, 30 bp, Artificial Sequence
  Description of Artificial Sequence: Synthetic oligonucleotide
cctataaacatattcactaaaatctcactc

SEQ ID NO: 1426 - DNA, 22 bp, Artificial Sequence
  Description of Artificial Sequence: Synthetic oligonucleotide
acctactaaaatccctacctat

SEQ ID NO: 1427 - DNA, 30 bp, Artificial Sequence
  Description of Artificial Sequence: Synthetic oligonucleotide
acctataaacatattcactaaaatctcact

SEQ ID NO: 1428 - DNA, 23 bp, Artificial Sequence
  Description of Artificial Sequence: Synthetic oligonucleotide
aacctactaaaatccctacctat

SEQ ID NO: 1429 - DNA, 24 bp, Artificial Sequence
  Description of Artificial Sequence: Synthetic oligonucleotide
caacctactaaaatccctacctat

SEQ ID NO: 1430 - DNA, 25 bp, Artificial Sequence
  Description of Artificial Sequence: Synthetic oligonucleotide
acaacctactaaaatccctacctat

SEQ ID NO: 1431 - DNA, 26 bp, Artificial Sequence
  Description of Artificial Sequence: Synthetic oligonucleotide
aacaacctactaaaatccctacctat

SEQ ID NO: 1432 - DNA, 30 bp, Artificial Sequence
  Description of Artificial Sequence: Synthetic oligonucleotide
ctataaacatattcactaaaatctcactct

SEQ ID NO: 1433 - DNA, 31 bp, Artificial Sequence
  Description of Artificial Sequence: Synthetic oligonucleotide
tacctataaacatattcactaaaatctcact

SEQ ID NO: 1434 - DNA, 31 bp, Artificial Sequence
  Description of Artificial Sequence: Synthetic oligonucleotide
acctataaacatattcactaaaatctcactc

SEQ ID NO: 1435 - DNA, 31 bp, Artificial Sequence
  Description of Artificial Sequence: Synthetic oligonucleotide
cctataaacatattcactaaaatctcactct

SEQ ID NO: 1436 - DNA, 32 bp, Artificial Sequence
  Description of Artificial Sequence: Synthetic oligonucleotide
acctataaacatattcactaaaatctcactct

SEQ ID NO: 1437 - DNA, 32 bp, Artificial Sequence
  Description of Artificial Sequence: Synthetic oligonucleotide
ctacctataaacatattcactaaaatctcact

SEQ ID NO: 1438 - DNA, 22 bp, Artificial Sequence
  Description of Artificial Sequence: Synthetic oligonucleotide
caacctactaaaatccctacct

SEQ ID NO: 1439 - DNA, 23 bp, Artificial Sequence
  Description of Artificial Sequence: Synthetic oligonucleotide
acaacctactaaaatccctacct

SEQ ID NO: 1440 - DNA, 32 bp, Artificial Sequence
  Description of Artificial Sequence: Synthetic oligonucleotide
tacctataaacatattcactaaaatctcactc

SEQ ID NO: 1441 - DNA, 33 bp, Artificial Sequence
  Description of Artificial Sequence: Synthetic oligonucleotide
acctataaacatattcactaaaatctcactctc

SEQ ID NO: 1442 - DNA, 33 bp, Artificial Sequence
  Description of Artificial Sequence: Synthetic oligonucleotide
cctacctataaacatattcactaaaatctcact

SEQ ID NO: 1443 - DNA, 33 bp, Artificial Sequence
  Description of Artificial Sequence: Synthetic oligonucleotide
tacctataaacatattcactaaaatctcactct

SEQ ID NO: 1444 - DNA, 33 bp, Artificial Sequence
  Description of Artificial Sequence: Synthetic oligonucleotide
cctataaacatattcactaaaatctcactctct

SEQ ID NO: 1445 - DNA, 33 bp, Artificial Sequence
  Description of Artificial Sequence: Synthetic oligonucleotide
ctacctataaacatattcactaaaatctcactc

SEQ ID NO: 1446 - DNA, 33 bp, Artificial Sequence
  Description of Artificial Sequence: Synthetic oligonucleotide
ctataaacatattcactaaaatctcactctcta

SEQ ID NO: 1447 - DNA, 34 bp, Artificial Sequence
  Description of Artificial Sequence: Synthetic oligonucleotide
ctataaacatattcactaaaatctcactctctaa

SEQ ID NO: 1448 - DNA, 17 bp, Artificial Sequence
  Description of Artificial Sequence: Synthetic oligonucleotide
actcccaatctcctcct

SEQ ID NO: 1449 - DNA, 23 bp, Artificial Sequence
  Description of Artificial Sequence: Synthetic oligonucleotide
gggttgttttggtttaagtagat

SEQ ID NO: 1450 - DNA, 16 bp, Artificial Sequence
  Description of Artificial Sequence: Synthetic oligonucleotide
cctcctcgccgcgacc

SEQ ID NO: 1451 - DNA, 17 bp, Artificial Sequence
  Description of Artificial Sequence: Synthetic oligonucleotide
cccacaaccatatctac

SEQ ID NO: 1452 - DNA, 19 bp, Artificial Sequence
  Description of Artificial Sequence: Synthetic oligonucleotide
atctcctcctcaccacaac

SEQ ID NO: 1453 - DNA, 21 bp, Artificial Sequence
  Description of Artificial Sequence: Synthetic oligonucleotide
ggggttgttttggtttaagta

SEQ ID NO: 1454 - DNA, 22 bp, Artificial Sequence
  Description of Artificial Sequence: Synthetic oligonucleotide
ggttgttttggtttaagtagat

SEQ ID NO: 1455 - DNA, 20 bp, Artificial Sequence
  Description of Artificial Sequence: Synthetic oligonucleotide
aatctcctcctcaccacaac

SEQ ID NO: 1456 - DNA, 21 bp, Artificial Sequence
  Description of Artificial Sequence: Synthetic oligonucleotide
aatctcctcctcaccacaacc

SEQ ID NO: 1457 - DNA, 21 bp, Artificial Sequence
  Description of Artificial Sequence: Synthetic oligonucleotide
caatctcctcctcaccacaac

SEQ ID NO: 1458 - DNA, 22 bp, Artificial Sequence
  Description of Artificial Sequence: Synthetic oligonucleotide
caatctcctcctcaccacaacc

SEQ ID NO: 1459 - DNA, 22 bp, Artificial Sequence
  Description of Artificial Sequence: Synthetic oligonucleotide
accttcttaaacattcctatcc

SEQ ID NO: 1460 - DNA, 20 bp, Artificial Sequence
  Description of Artificial Sequence: Synthetic oligonucleotide
ttggggaaagaggtaatttt

SEQ ID NO: 1461 - DNA, 16 bp, Artificial Sequence
  Description of Artificial Sequence: Synthetic oligonucleotide
caacccgcgtccgaaa

SEQ ID NO: 1462 - DNA, 19 bp, Artificial Sequence
  Description of Artificial Sequence: Synthetic oligonucleotide
aaaaattacctctttcccc

SEQ ID NO: 1463 - DNA, 21 bp, Artificial Sequence
  Description of Artificial Sequence: Synthetic oligonucleotide
cctatccaacccacatccaaa

SEQ ID NO: 1464 - DNA, 21 bp, Artificial Sequence
  Description of Artificial Sequence: Synthetic oligonucleotide
tttggggaaagaggtaatttt

SEQ ID NO: 1465 - DNA, 22 bp, Artificial Sequence
  Description of Artificial Sequence: Synthetic oligonucleotide
ttttggggaaagaggtaatttt

SEQ ID NO: 1466 - DNA, 22 bp, Artificial Sequence
  Description of Artificial Sequence: Synthetic oligonucleotide
ggtaagaaggaagggaaatagt

SEQ ID NO: 1467 - DNA, 16 bp, Artificial Sequence
  Description of Artificial Sequence: Synthetic oligonucleotide
cttcccaacactccac

SEQ ID NO: 1468 - DNA, 21 bp, Artificial Sequence
  Description of Artificial Sequence: Synthetic oligonucleotide
gagttaaggtgtagggagtgg

SEQ ID NO: 1469 - DNA, 20 bp, Artificial Sequence
  Description of Artificial Sequence: Synthetic oligonucleotide
tttttggggaaagaggtaat

SEQ ID NO: 1470 - DNA, 19 bp, Artificial Sequence
  Description of Artificial Sequence: Synthetic oligonucleotide
aaaattacctctttcccca

SEQ ID NO: 1471 - DNA, 19 bp, Artificial Sequence
  Description of Artificial Sequence: Synthetic oligonucleotide
tggggaaagaggtaatttt

SEQ ID NO: 1472 - DNA, 22 bp, Artificial Sequence
  Description of Artificial Sequence: Synthetic oligonucleotide
tagtggagtgttgggaagtaag

SEQ ID NO: 1473 - DNA, 18 bp, Artificial Sequence
  Description of Artificial Sequence: Synthetic oligonucleotide
cctctttccccaaaaaac

SEQ ID NO: 1474 - DNA, 21 bp, Artificial Sequence
  Description of Artificial Sequence: Synthetic oligonucleotide
ttagtggagtgttgggaagta

SEQ ID NO: 1475 - DNA, 17 bp, Artificial Sequence
  Description of Artificial Sequence: Synthetic oligonucleotide
cttacttcccaacactc

SEQ ID NO: 1476 - DNA, 21 bp, Artificial Sequence
  Description of Artificial Sequence: Synthetic oligonucleotide
ggagttaaggtgtagggagtg

SEQ ID NO: 1477 - DNA, 23 bp, Artificial Sequence
  Description of Artificial Sequence: Synthetic oligonucleotide
gagtgttgggaagtaagttgtaa

SEQ ID NO: 1478 - DNA, 21 bp, Artificial Sequence
  Description of Artificial Sequence: Synthetic oligonucleotide
taggatggaggtaagaaggaa

SEQ ID NO: 1479 - DNA, 22 bp, Artificial Sequence
  Description of Artificial Sequence: Synthetic oligonucleotide
agtgttgggaagtaagttgtaa

SEQ ID NO: 1480 - DNA, 21 bp, Artificial Sequence
  Description of Artificial Sequence: Synthetic oligonucleotide
gtggagtgttgggaagtaagt

SEQ ID NO: 1481 - DNA, 22 bp, Artificial Sequence
  Description of Artificial Sequence: Synthetic oligonucleotide
agtggagtgttgggaagtaagt

SEQ ID NO: 1482 - DNA, 23 bp, Artificial Sequence
  Description of Artificial Sequence: Synthetic oligonucleotide
aggtaagaaggaagggaaatagt

SEQ ID NO: 1483 - DNA, 19 bp, Artificial Sequence
  Description of Artificial Sequence: Synthetic oligonucleotide
ttaaggtgtagggagtggg

SEQ ID NO: 1484 - DNA, 20 bp, Artificial Sequence
  Description of Artificial Sequence: Synthetic oligonucleotide
gttaaggtgtagggagtggg

SEQ ID NO: 1485 - DNA, 21 bp, Artificial Sequence
  Description of Artificial Sequence: Synthetic oligonucleotide
agttaaggtgtagggagtggg

SEQ ID NO: 1486 - DNA, 22 bp, Artificial Sequence
  Description of Artificial Sequence: Synthetic oligonucleotide
ggagtgttgggaagtaagttgt

SEQ ID NO: 1487 - DNA, 22 bp, Artificial Sequence
  Description of Artificial Sequence: Synthetic oligonucleotide
gtgttgggaagtaagttgtaat

SEQ ID NO: 1488 - DNA, 20 bp, Artificial Sequence
  Description of Artificial Sequence: Synthetic oligonucleotide
tggagtgttgggaagtaagt

SEQ ID NO: 1489 - DNA, 20 bp, Artificial Sequence
  Description of Artificial Sequence: Synthetic oligonucleotide
gatggaggtaagaaggaagg

SEQ ID NO: 1490 - DNA, 20 bp, Artificial Sequence
  Description of Artificial Sequence: Synthetic oligonucleotide
ggatggaggtaagaaggaag

SEQ ID NO: 1491 - DNA, 20 bp, Artificial Sequence
  Description of Artificial Sequence: Synthetic oligonucleotide
aggatggaggtaagaaggaa

SEQ ID NO: 1492 - DNA, 22 bp, Artificial Sequence
  Description of Artificial Sequence: Synthetic oligonucleotide
tttagtggagtgttgggaagta

SEQ ID NO: 1493 - DNA, 20 bp, Artificial Sequence
  Description of Artificial Sequence: Synthetic oligonucleotide
atggaggtaagaaggaaggg

SEQ ID NO: 1494 - DNA, 21 bp, Artificial Sequence
  Description of Artificial Sequence: Synthetic oligonucleotide
tgttgggaagtaagttgtaat

SEQ ID NO: 1495 - DNA, 19 bp, Artificial Sequence
  Description of Artificial Sequence: Synthetic oligonucleotide
taaggtgtagggagtgggg

SEQ ID NO: 1496 - DNA, 17 bp, Artificial Sequence
  Description of Artificial Sequence: Synthetic oligonucleotide
aggtgtagggagtgggg

SEQ ID NO: 1497 - DNA, 21 bp, Artificial Sequence
  Description of Artificial Sequence: Synthetic oligonucleotide
gggagttaaggtgtagggagt

SEQ ID NO: 1498 - DNA, 19 bp, Artificial Sequence
  Description of Artificial Sequence: Synthetic oligonucleotide
tggaggtaagaaggaaggg

SEQ ID NO: 1499 - DNA, 21 bp, Artificial Sequence
  Description of Artificial Sequence: Synthetic oligonucleotide
gtaagaaggaagggaaatagt

SEQ ID NO: 1500 - DNA, 18 bp, Artificial Sequence
  Description of Artificial Sequence: Synthetic oligonucleotide
ggggaaagaggtaatttt

SEQ ID NO: 1501 - DNA, 23 bp, Artificial Sequence
  Description of Artificial Sequence: Synthetic oligonucleotide
ttttagtggagtgttgggaagta

SEQ ID NO: 1502 - DNA, 18 bp, Artificial Sequence
  Description of Artificial Sequence: Synthetic oligonucleotide
aaggtgtagggagtgggg

SEQ ID NO: 1503 - DNA, 17 bp, Artificial Sequence
  Description of Artificial Sequence: Synthetic oligonucleotide
gggggatgtaggatgga

SEQ ID NO: 1504 - DNA, 18 bp, Artificial Sequence
  Description of Artificial Sequence: Synthetic oligonucleotide
ggggatgtaggatggagg

SEQ ID NO: 1505 - DNA, 17 bp, Artificial Sequence
  Description of Artificial Sequence: Synthetic oligonucleotide
gggatgtaggatggagg

SEQ ID NO: 1506 - DNA, 20 bp, Artificial Sequence
  Description of Artificial Sequence: Synthetic oligonucleotide
agggagttaaggtgtaggga

SEQ ID NO: 1507 - DNA, 21 bp, Artificial Sequence
  Description of Artificial Sequence: Synthetic oligonucleotide
tgaaatagggagttaaggtgt

SEQ ID NO: 1508 - DNA, 20 bp, Artificial Sequence
  Description of Artificial Sequence: Synthetic oligonucleotide
taagaaggaagggaaatagt

SEQ ID NO: 1509 - DNA, 24 bp, Artificial Sequence
  Description of Artificial Sequence: Synthetic oligonucleotide
tttttagtggagtgttgggaagta

SEQ ID NO: 1510 - DNA, 21 bp, Artificial Sequence
  Description of Artificial Sequence: Synthetic oligonucleotide
tagggagttaaggtgtaggga

SEQ ID NO: 1511 - DNA, 23 bp, Artificial Sequence
  Description of Artificial Sequence: Synthetic oligonucleotide
taccttcttaaacattcctatcc

SEQ ID NO: 1512 - DNA, 24 bp, Artificial Sequence
  Description of Artificial Sequence: Synthetic oligonucleotide
ataccttcttaaacattcctatcc

SEQ ID NO: 1513 - DNA, 25 bp, Artificial Sequence
  Description of Artificial Sequence: Synthetic oligonucleotide
tataccttcttaaacattcctatcc

SEQ ID NO: 1514 - DNA, 21 bp, Artificial Sequence
  Description of Artificial Sequence: Synthetic oligonucleotide
ctatccaacccacatccaaaa

SEQ ID NO: 1515 - DNA, 22 bp, Artificial Sequence
  Description of Artificial Sequence: Synthetic oligonucleotide
tcctatccaacccacatccaaa

SEQ ID NO: 1516 - DNA, 22 bp, Artificial Sequence
  Description of Artificial Sequence: Synthetic oligonucleotide
cctatccaacccacatccaaaa

SEQ ID NO: 1517 - DNA, 23 bp, Artificial Sequence
  Description of Artificial Sequence: Synthetic oligonucleotide
tcctatccaacccacatccaaaa

SEQ ID NO: 1518 - DNA, 23 bp, Artificial Sequence
  Description of Artificial Sequence: Synthetic oligonucleotide
ttcctatccaacccacatccaaa

SEQ ID NO: 1519 - DNA, 24 bp, Artificial Sequence
  Description of Artificial Sequence: Synthetic oligonucleotide
attcctatccaacccacatccaaa

SEQ ID NO: 1520 - DNA, 24 bp, Artificial Sequence
  Description of Artificial Sequence: Synthetic oligonucleotide
cattataccttcttaaacattcct

SEQ ID NO: 1521 - DNA, 25 bp, Artificial Sequence
  Description of Artificial Sequence: Synthetic oligonucleotide
acattataccttcttaaacattcct

SEQ ID NO: 1522 - DNA, 26 bp, Artificial Sequence
  Description of Artificial Sequence: Synthetic oligonucleotide
aacattataccttcttaaacattcct

SEQ ID NO: 1523 - DNA, 25 bp, Artificial Sequence
  Description of Artificial Sequence: Synthetic oligonucleotide
accttcttaaacattcctatccaac

SEQ ID NO: 1524 - DNA, 24 bp, Artificial Sequence
  Description of Artificial Sequence: Synthetic oligonucleotide
tccaacccacatccaaaaaatact

SEQ ID NO: 1525 - DNA, 24 bp, Artificial Sequence
  Description of Artificial Sequence: Synthetic oligonucleotide
ttcctatccaacccacatccaaaa

SEQ ID NO: 1526 - DNA, 25 bp, Artificial Sequence
  Description of Artificial Sequence: Synthetic oligonucleotide
ttcctatccaacccacatccaaaaa

SEQ ID NO: 1527 - DNA, 25 bp, Artificial Sequence
  Description of Artificial Sequence: Synthetic oligonucleotide
tccaacccacatccaaaaaatactc

SEQ ID NO: 1528 - DNA, 25 bp, Artificial Sequence
  Description of Artificial Sequence: Synthetic oligonucleotide
attcctatccaacccacatccaaaa

SEQ ID NO: 1529 - DNA, 26 bp, Artificial Sequence
  Description of Artificial Sequence: Synthetic oligonucleotide
cattcctatccaacccacatccaaaa

SEQ ID NO: 1530 - DNA, 25 bp, Artificial Sequence
  Description of Artificial Sequence: Synthetic oligonucleotide
aacattataccttcttaaacattcc

SEQ ID NO: 1531 - DNA, 26 bp, Artificial Sequence
  Description of Artificial Sequence: Synthetic oligonucleotide
tccaacccacatccaaaaaatactca

SEQ ID NO: 1532 - DNA, 26 bp, Artificial Sequence
  Description of Artificial Sequence: Synthetic oligonucleotide
attcctatccaacccacatccaaaaa

SEQ ID NO: 1533 - DNA, 17 bp, Artificial Sequence
  Description of Artificial Sequence: Synthetic oligonucleotide
tggaagtgtagggatgg

SEQ ID NO: 1534 - DNA, 22 bp, Artificial Sequence
  Description of Artificial Sequence: Synthetic oligonucleotide
acaccctaactttattttcctt

SEQ ID NO: 1535 - DNA, 16 bp, Artificial Sequence
  Description of Artificial Sequence: Synthetic oligonucleotide
ggcgtagtcgcgattg

SEQ ID NO: 1536 - DNA, 20 bp, Artificial Sequence
  Description of Artificial Sequence: Synthetic oligonucleotide
ggttttggaatagagaatag

SEQ ID NO: 1537 - DNA, 23 bp, Artificial Sequence
  Description of Artificial Sequence: Synthetic oligonucleotide
ggatggtgtagttgtgattgtgt

SEQ ID NO: 1538 - DNA, 24 bp, Artificial Sequence
  Description of Artificial Sequence: Synthetic oligonucleotide
ttacaccctaactttattttcctt

SEQ ID NO: 1539 - DNA, 23 bp, Artificial Sequence
  Description of Artificial Sequence: Synthetic oligonucleotide
tacaccctaactttattttcctt

SEQ ID NO: 1540 - DNA, 21 bp, Artificial Sequence
  Description of Artificial Sequence: Synthetic oligonucleotide
caccctaactttattttcctt

SEQ ID NO: 1541 - DNA, 22 bp, Artificial Sequence
  Description of Artificial Sequence: Synthetic oligonucleotide
aaatcacttacaccctaacttt

SEQ ID NO: 1542 - DNA, 19 bp, Artificial Sequence
  Description of Artificial Sequence: Synthetic oligonucleotide
taaagttagggtgtaagtg

SEQ ID NO: 1543 - DNA, 24 bp, Artificial Sequence
  Description of Artificial Sequence: Synthetic oligonucleotide
tctattccaaaaccattttactta

SEQ ID NO: 1544 - DNA, 24 bp, Artificial Sequence
  Description of Artificial Sequence: Synthetic oligonucleotide
tttaagtaaaatggttttggaata

SEQ ID NO: 1545 - DNA, 25 bp, Artificial Sequence
  Description of Artificial Sequence: Synthetic oligonucleotide
cttacaccctaactttattttcctt

SEQ ID NO: 1546 - DNA, 25 bp, Artificial Sequence
  Description of Artificial Sequence: Synthetic oligonucleotide
ctctattccaaaaccattttactta

SEQ ID NO: 1547 - DNA, 23 bp, Artificial Sequence
  Description of Artificial Sequence: Synthetic oligonucleotide
ctattccaaaaccattttactta

SEQ ID NO: 1548 - DNA, 22 bp, Artificial Sequence
  Description of Artificial Sequence: Synthetic oligonucleotide
tattccaaaaccattttactta

SEQ ID NO: 1549 - DNA, 21 bp, Artificial Sequence
  Description of Artificial Sequence: Synthetic oligonucleotide
attccaaaaccattttactta

SEQ ID NO: 1550 - DNA, 26 bp, Artificial Sequence
  Description of Artificial Sequence: Synthetic oligonucleotide
tctctattccaaaaccattttactta

SEQ ID NO: 1551 - DNA, 20 bp, Artificial Sequence
  Description of Artificial Sequence: Synthetic oligonucleotide
ttccaaaaccattttactta

SEQ ID NO: 1552 - DNA, 27 bp, Artificial Sequence
  Description of Artificial Sequence: Synthetic oligonucleotide
ttctctattccaaaaccattttactta

SEQ ID NO: 1553 - DNA, 28 bp, Artificial Sequence
  Description of Artificial Sequence: Synthetic oligonucleotide
attctctattccaaaaccattttactta

SEQ ID NO: 1554 - DNA, 29 bp, Artificial Sequence
  Description of Artificial Sequence: Synthetic oligonucleotide
tattctctattccaaaaccattttactta

SEQ ID NO: 1555 - DNA, 20 bp, Artificial Sequence
  Description of Artificial Sequence: Synthetic oligonucleotide
agggatggtgtagttgtgat

SEQ ID NO: 1556 - DNA, 20 bp, Artificial Sequence
  Description of Artificial Sequence: Synthetic oligonucleotide
tagggatggtgtagttgtga

SEQ ID NO: 1557 - DNA, 21 bp, Artificial Sequence
  Description of Artificial Sequence: Synthetic oligonucleotide
agggatggtgtagttgtgatt

SEQ ID NO: 1558 - DNA, 21 bp, Artificial Sequence
  Description of Artificial Sequence: Synthetic oligonucleotide
tagggatggtgtagttgtgat

SEQ ID NO: 1559 - DNA, 21 bp, Artificial Sequence
  Description of Artificial Sequence: Synthetic oligonucleotide
gggatggtgtagttgtgattg

SEQ ID NO: 1560 - DNA, 21 bp, Artificial Sequence
  Description of Artificial Sequence: Synthetic oligonucleotide
gtagggatggtgtagttgtga

SEQ ID NO: 1561 - DNA, 22 bp, Artificial Sequence
  Description of Artificial Sequence: Synthetic oligonucleotide
tagggatggtgtagttgtgatt

SEQ ID NO: 1562 - DNA, 22 bp, Artificial Sequence
  Description of Artificial Sequence: Synthetic oligonucleotide
agggatggtgtagttgtgattg

SEQ ID NO: 1563 - DNA, 22 bp, Artificial Sequence
  Description of Artificial Sequence: Synthetic oligonucleotide
gtagggatggtgtagttgtgat

SEQ ID NO: 1564 - DNA, 22 bp, Artificial Sequence
  Description of Artificial Sequence: Synthetic oligonucleotide
tgtagggatggtgtagttgtga

SEQ ID NO: 1565 - DNA, 23 bp, Artificial Sequence
  Description of Artificial Sequence: Synthetic oligonucleotide
gtagggatggtgtagttgtgatt

SEQ ID NO: 1566 - DNA, 23 bp, Artificial Sequence
  Description of Artificial Sequence: Synthetic oligonucleotide
tagggatggtgtagttgtgattg

SEQ ID NO: 1567 - DNA, 22 bp, Artificial Sequence
  Description of Artificial Sequence: Synthetic oligonucleotide
gtgttgtggaaaagaaaggata

SEQ ID NO: 1568 - DNA, 24 bp, Artificial Sequence
  Description of Artificial Sequence: Synthetic oligonucleotide
aaacatctctaattcctaatttct

SEQ ID NO: 1569 - DNA, 16 bp, Artificial Sequence
  Description of Artificial Sequence: Synthetic oligonucleotide
gacgcgatggatcgtg

SEQ ID NO: 1570 - DNA, 21 bp, Artificial Sequence
  Description of Artificial Sequence: Synthetic oligonucleotide
tgtggaaaagaaaggataata

SEQ ID NO: 1571 - DNA, 25 bp, Artificial Sequence
  Description of Artificial Sequence: Synthetic oligonucleotide
aggataatagaaatgtagatgtgat

SEQ ID NO: 1572 - DNA, 23 bp, Artificial Sequence
  Description of Artificial Sequence: Synthetic oligonucleotide
aacatctctaattcctaatttct

SEQ ID NO: 1573 - DNA, 25 bp, Artificial Sequence
  Description of Artificial Sequence: Synthetic oligonucleotide
taaacatctctaattcctaatttct

SEQ ID NO: 1574 - DNA, 21 bp, Artificial Sequence
  Description of Artificial Sequence: Synthetic oligonucleotide
tgttgtggaaaagaaaggata

SEQ ID NO: 1575 - DNA, 21 bp, Artificial Sequence
  Description of Artificial Sequence: Synthetic oligonucleotide
gttgtggaaaagaaaggataa

SEQ ID NO: 1576 - DNA, 20 bp, Artificial Sequence
  Description of Artificial Sequence: Synthetic oligonucleotide
ttgtggaaaagaaaggataa

SEQ ID NO: 1577 - DNA, 23 bp, Artificial Sequence
  Description of Artificial Sequence: Synthetic oligonucleotide
ggtgttgtggaaaagaaaggata

SEQ ID NO: 1578 - DNA, 22 bp, Artificial Sequence
  Description of Artificial Sequence: Synthetic oligonucleotide
tgttgtggaaaagaaaggataa

SEQ ID NO: 1579 - DNA, 25 bp, Artificial Sequence
  Description of Artificial Sequence: Synthetic oligonucleotide
ggataatagaaatgtagatgtgatg

SEQ ID NO: 1580 - DNA, 23 bp, Artificial Sequence
  Description of Artificial Sequence: Synthetic oligonucleotide
gtgttgtggaaaagaaaggataa

SEQ ID NO: 1581 - DNA, 25 bp, Artificial Sequence
  Description of Artificial Sequence: Synthetic oligonucleotide
aaggataatagaaatgtagatgtga

SEQ ID NO: 1582 - DNA, 22 bp, Artificial Sequence
  Description of Artificial Sequence: Synthetic oligonucleotide
ggtgttgtggaaaagaaaggat

SEQ ID NO: 1583 - DNA, 20 bp, Artificial Sequence
  Description of Artificial Sequence: Synthetic oligonucleotide
gttgtggaaaagaaaggata

SEQ ID NO: 1584 - DNA, 26 bp, Artificial Sequence
  Description of Artificial Sequence: Synthetic oligonucleotide
aaaggataatagaaatgtagatgtga

SEQ ID NO: 1585 - DNA, 26 bp, Artificial Sequence
  Description of Artificial Sequence: Synthetic oligonucleotide
ggataatagaaatgtagatgtgatgg

SEQ ID NO: 1586 - DNA, 26 bp, Artificial Sequence
  Description of Artificial Sequence: Synthetic oligonucleotide
aaggataatagaaatgtagatgtgat

SEQ ID NO: 1587 - DNA, 26 bp, Artificial Sequence
  Description of Artificial Sequence: Synthetic oligonucleotide
aggataatagaaatgtagatgtgatg

SEQ ID NO: 1588 - DNA, 27 bp, Artificial Sequence
  Description of Artificial Sequence: Synthetic oligonucleotide
gaaaggataatagaaatgtagatgtga

SEQ ID NO: 1589 - DNA, 20 bp, Artificial Sequence
  Description of Artificial Sequence: Synthetic oligonucleotide
ggtgttgtggaaaagaaagg

SEQ ID NO: 1590 - DNA, 19 bp, Artificial Sequence
  Description of Artificial Sequence: Synthetic oligonucleotide
gttgtggaaaagaaaggat

SEQ ID NO: 1591 - DNA, 27 bp, Artificial Sequence
  Description of Artificial Sequence: Synthetic oligonucleotide
aaaggataatagaaatgtagatgtgat

SEQ ID NO: 1592 - DNA, 27 bp, Artificial Sequence
  Description of Artificial Sequence: Synthetic oligonucleotide
aaggataatagaaatgtagatgtgatg

SEQ ID NO: 1593 - DNA, 21 bp, Artificial Sequence
  Description of Artificial Sequence: Synthetic oligonucleotide
aacaccaataacccaaatact

SEQ ID NO: 1594 - DNA, 22 bp, Artificial Sequence
  Description of Artificial Sequence: Synthetic oligonucleotide
gaaggaaaaagtaggggatatt

SEQ ID NO: 1595 - DNA, 16 bp, Artificial Sequence
  Description of Artificial Sequence: Synthetic oligonucleotide
tatcgtaaccgcgcac

SEQ ID NO: 1596 - DNA, 17 bp, Artificial Sequence
  Description of Artificial Sequence: Synthetic oligonucleotide
tcaactctaccaacccc

SEQ ID NO: 1597 - DNA, 23 bp, Artificial Sequence
  Description of Artificial Sequence: Synthetic oligonucleotide
ccaaatactatcataaccacaca

SEQ ID NO: 1598 - DNA, 22 bp, Artificial Sequence
  Description of Artificial Sequence: Synthetic oligonucleotide
aaggaaaaagtaggggatattt

SEQ ID NO: 1599 - DNA, 21 bp, Artificial Sequence
  Description of Artificial Sequence: Synthetic oligonucleotide
ggaaggaaaaagtaggggata

SEQ ID NO: 1600 - DNA, 22 bp, Artificial Sequence
  Description of Artificial Sequence: Synthetic oligonucleotide
gttggtagagttgaaaggagat

SEQ ID NO: 1601 - DNA, 19 bp, Artificial Sequence
  Description of Artificial Sequence: Synthetic oligonucleotide
ctatctcctttcaactcta

SEQ ID NO: 1602 - DNA, 23 bp, Artificial Sequence
  Description of Artificial Sequence: Synthetic oligonucleotide
ttggtagagttgaaaggagatag

SEQ ID NO: 1603 - DNA, 19 bp, Artificial Sequence
  Description of Artificial Sequence: Synthetic oligonucleotide
atctatctcctttcaactc

SEQ ID NO: 1604 - DNA, 22 bp, Artificial Sequence
  Description of Artificial Sequence: Synthetic oligonucleotide
tggtagagttgaaaggagatag

SEQ ID NO: 1605 - DNA, 23 bp, Artificial Sequence
  Description of Artificial Sequence: Synthetic oligonucleotide
ggttggtagagttgaaaggagat

SEQ ID NO: 1606 - DNA, 25 bp, Artificial Sequence
  Description of Artificial Sequence: Synthetic oligonucleotide
aggaaggaaaaagtaggggatattt

SEQ ID NO: 1607 - DNA, 21 bp, Artificial Sequence
  Description of Artificial Sequence: Synthetic oligonucleotide
ggtagagttgaaaggagatag

SEQ ID NO: 1608 - DNA, 20 bp, Artificial Sequence
  Description of Artificial Sequence: Synthetic oligonucleotide
acaccaataacccaaatact

SEQ ID NO: 1609 - DNA, 23 bp, Artificial Sequence
  Description of Artificial Sequence: Synthetic oligonucleotide
aatactatcataaccacacacct

SEQ ID NO: 1610 - DNA, 23 bp, Artificial Sequence
  Description of Artificial Sequence: Synthetic oligonucleotide
aaatactatcataaccacacacc

SEQ ID NO: 1611 - DNA, 24 bp, Artificial Sequence
  Description of Artificial Sequence: Synthetic oligonucleotide
ccaaatactatcataaccacacac

SEQ ID NO: 1612 - DNA, 24 bp, Artificial Sequence
  Description of Artificial Sequence: Synthetic oligonucleotide
aaatactatcataaccacacacct

SEQ ID NO: 1613 - DNA, 24 bp, Artificial Sequence
  Description of Artificial Sequence: Synthetic oligonucleotide
cccaaatactatcataaccacaca

SEQ ID NO: 1614 - DNA, 24 bp, Artificial Sequence
  Description of Artificial Sequence: Synthetic oligonucleotide
caaatactatcataaccacacacc

SEQ ID NO: 1615 - DNA, 24 bp, Artificial Sequence
  Description of Artificial Sequence: Synthetic oligonucleotide
aatactatcataaccacacacctt

SEQ ID NO: 1616 - DNA, 25 bp, Artificial Sequence
  Description of Artificial Sequence: Synthetic oligonucleotide
ccaaatactatcataaccacacacc

SEQ ID NO: 1617 - DNA, 25 bp, Artificial Sequence
  Description of Artificial Sequence: Synthetic oligonucleotide
acccaaatactatcataaccacaca

SEQ ID NO: 1618 - DNA, 25 bp, Artificial Sequence
  Description of Artificial Sequence: Synthetic oligonucleotide
aaatactatcataaccacacacctt

SEQ ID NO: 1619 - DNA, 25 bp, Artificial Sequence
  Description of Artificial Sequence: Synthetic oligonucleotide
cccaaatactatcataaccacacac

SEQ ID NO: 1620 - DNA, 25 bp, Artificial Sequence
  Description of Artificial Sequence: Synthetic oligonucleotide
caaatactatcataaccacacacct

SEQ ID NO: 1621 - DNA, 25 bp, Artificial Sequence
  Description of Artificial Sequence: Synthetic oligonucleotide
aatactatcataaccacacaccttt

SEQ ID NO: 1622 - DNA, 26 bp, Artificial Sequence
  Description of Artificial Sequence: Synthetic oligonucleotide
acccaaatactatcataaccacacac

SEQ ID NO: 1623 - DNA, 26 bp, Artificial Sequence
  Description of Artificial Sequence: Synthetic oligonucleotide
caaatactatcataaccacacacctt

SEQ ID NO: 1624 - DNA, 26 bp, Artificial Sequence
  Description of Artificial Sequence: Synthetic oligonucleotide
aaatactatcataaccacacaccttt

SEQ ID NO: 1625 - DNA, 26 bp, Artificial Sequence
  Description of Artificial Sequence: Synthetic oligonucleotide
ccaaatactatcataaccacacacct

SEQ ID NO: 1626 - DNA, 26 bp, Artificial Sequence
  Description of Artificial Sequence: Synthetic oligonucleotide
aatactatcataaccacacaccttta

SEQ ID NO: 1627 - DNA, 26 bp, Artificial Sequence
  Description of Artificial Sequence: Synthetic oligonucleotide
cccaaatactatcataaccacacacc

SEQ ID NO: 1628 - DNA, 26 bp, Artificial Sequence
  Description of Artificial Sequence: Synthetic oligonucleotide
aacccaaatactatcataaccacaca

SEQ ID NO: 1629 - DNA, 27 bp, Artificial Sequence
  Description of Artificial Sequence: Synthetic oligonucleotide
caaatactatcataaccacacaccttt

SEQ ID NO: 1630 - DNA, 27 bp, Artificial Sequence
  Description of Artificial Sequence: Synthetic oligonucleotide
cccaaatactatcataaccacacacct

SEQ ID NO: 1631 - DNA, 27 bp, Artificial Sequence
  Description of Artificial Sequence: Synthetic oligonucleotide
aaatactatcataaccacacaccttta

SEQ ID NO: 1632 - DNA, 20 bp, Artificial Sequence
  Description of Artificial Sequence: Synthetic oligonucleotide
aacaccaataacccaaatac

SEQ ID NO: 1633 - DNA, 27 bp, Artificial Sequence
  Description of Artificial Sequence: Synthetic oligonucleotide
taacccaaatactatcataaccacaca

SEQ ID NO: 1634 - DNA, 27 bp, Artificial Sequence
  Description of Artificial Sequence: Synthetic oligonucleotide
acccaaatactatcataaccacacacc

SEQ ID NO: 1635 - DNA, 27 bp, Artificial Sequence
  Description of Artificial Sequence: Synthetic oligonucleotide
aatactatcataaccacacacctttaa

SEQ ID NO: 1636 - DNA, 27 bp, Artificial Sequence
  Description of Artificial Sequence: Synthetic oligonucleotide
aacccaaatactatcataaccacacac

SEQ ID NO: 1637 - DNA, 27 bp, Artificial Sequence
  Description of Artificial Sequence: Synthetic oligonucleotide
ccaaatactatcataaccacacacctt

SEQ ID NO: 1638 - DNA, 28 bp, Artificial Sequence
  Description of Artificial Sequence: Synthetic oligonucleotide
aaatactatcataaccacacacctttaa

SEQ ID NO: 1639 - DNA, 28 bp, Artificial Sequence
  Description of Artificial Sequence: Synthetic oligonucleotide
cccaaatactatcataaccacacacctt

SEQ ID NO: 1640 - DNA, 28 bp, Artificial Sequence
  Description of Artificial Sequence: Synthetic oligonucleotide
ccaaatactatcataaccacacaccttt

SEQ ID NO: 1641 - DNA, 28 bp, Artificial Sequence
  Description of Artificial Sequence: Synthetic oligonucleotide
acccaaatactatcataaccacacacct

SEQ ID NO: 1642 - DNA, 28 bp, Artificial Sequence
  Description of Artificial Sequence: Synthetic oligonucleotide
caaatactatcataaccacacaccttta

SEQ ID NO: 1643 - DNA, 28 bp, Artificial Sequence
  Description of Artificial Sequence: Synthetic oligonucleotide
aatactatcataaccacacacctttaaa

SEQ ID NO: 1644 - DNA, 29 bp, Artificial Sequence
  Description of Artificial Sequence: Synthetic oligonucleotide
cccaaatactatcataaccacacaccttt

SEQ ID NO: 1645 - DNA, 29 bp, Artificial Sequence
  Description of Artificial Sequence: Synthetic oligonucleotide
aaatactatcataaccacacacctttaaa

SEQ ID NO: 1646 - DNA, 29 bp, Artificial Sequence
  Description of Artificial Sequence: Synthetic oligonucleotide
aatactatcataaccacacacctttaaaa

SEQ ID NO: 1647 - DNA, 29 bp, Artificial Sequence
  Description of Artificial Sequence: Synthetic oligonucleotide
ccaaatactatcataaccacacaccttta

SEQ ID NO: 1648 - DNA, 29 bp, Artificial Sequence
  Description of Artificial Sequence: Synthetic oligonucleotide
caaatactatcataaccacacacctttaa

SEQ ID NO: 1649 - DNA, 30 bp, Artificial Sequence
  Description of Artificial Sequence: Synthetic oligonucleotide
caaatactatcataaccacacacctttaaa

SEQ ID NO: 1650 - DNA, 30 bp, Artificial Sequence
  Description of Artificial Sequence: Synthetic oligonucleotide
aaatactatcataaccacacacctttaaaa

SEQ ID NO: 1651 - DNA, 30 bp, Artificial Sequence
  Description of Artificial Sequence: Synthetic oligonucleotide
cccaaatactatcataaccacacaccttta

SEQ ID NO: 1652 - DNA, 30 bp, Artificial Sequence
  Description of Artificial Sequence: Synthetic oligonucleotide
aatactatcataaccacacacctttaaaat

SEQ ID NO: 1653 - DNA, 30 bp, Artificial Sequence
  Description of Artificial Sequence: Synthetic oligonucleotide
ccaaatactatcataaccacacacctttaa

SEQ ID NO: 1654 - DNA, 31 bp, Artificial Sequence
  Description of Artificial Sequence: Synthetic oligonucleotide
aaatactatcataaccacacacctttaaaat

SEQ ID NO: 1655 - DNA, 31 bp, Artificial Sequence
  Description of Artificial Sequence: Synthetic oligonucleotide
aatactatcataaccacacacctttaaaatt

SEQ ID NO: 1656 - DNA, 31 bp, Artificial Sequence
  Description of Artificial Sequence: Synthetic oligonucleotide
ccaaatactatcataaccacacacctttaaa

SEQ ID NO: 1657 - DNA, 31 bp, Artificial Sequence
  Description of Artificial Sequence: Synthetic oligonucleotide
caaatactatcataaccacacacctttaaaa

SEQ ID NO: 1658 - DNA, 32 bp, Artificial Sequence
  Description of Artificial Sequence: Synthetic oligonucleotide
caaatactatcataaccacacacctttaaaat

SEQ ID NO: 1659 - DNA, 32 bp, Artificial Sequence
  Description of Artificial Sequence: Synthetic oligonucleotide
aatactatcataaccacacacctttaaaattt

SEQ ID NO: 1660 - DNA, 32 bp, Artificial Sequence
  Description of Artificial Sequence: Synthetic oligonucleotide
aaatactatcataaccacacacctttaaaatt

SEQ ID NO: 1661 - DNA, 33 bp, Artificial Sequence
  Description of Artificial Sequence: Synthetic oligonucleotide
aatactatcataaccacacacctttaaaatttt

SEQ ID NO: 1662 - DNA, 33 bp, Artificial Sequence
  Description of Artificial Sequence: Synthetic oligonucleotide
aaatactatcataaccacacacctttaaaattt

SEQ ID NO: 1663 - DNA, 34 bp, Artificial Sequence
  Description of Artificial Sequence: Synthetic oligonucleotide
aatactatcataaccacacacctttaaaatttta

SEQ ID NO: 1664 - DNA, 24 bp, Artificial Sequence
  Description of Artificial Sequence: Synthetic oligonucleotide
acaactaaatatcaaaacaatcac

SEQ ID NO: 1665 - DNA, 20 bp, Artificial Sequence
  Description of Artificial Sequence: Synthetic oligonucleotide
gtatttggagtaaggagggg

SEQ ID NO: 1666 - DNA, 16 bp, Artificial Sequence
  Description of Artificial Sequence: Synthetic oligonucleotide
atcaccgcctcgcgac

SEQ ID NO: 1667 - DNA, 17 bp, Artificial Sequence
  Description of Artificial Sequence: Synthetic oligonucleotide
tccaacccccacaacta

SEQ ID NO: 1668 - DNA, 19 bp, Artificial Sequence
  Description of Artificial Sequence: Synthetic oligonucleotide
caatcaccacctcacaacc

SEQ ID NO: 1669 - DNA, 20 bp, Artificial Sequence
  Description of Artificial Sequence: Synthetic oligonucleotide
ggtatttggagtaaggaggg

SEQ ID NO: 1670 - DNA, 18 bp, Artificial Sequence
  Description of Artificial Sequence: Synthetic oligonucleotide
atttggagtaaggagggg

SEQ ID NO: 1671 - DNA, 20 bp, Artificial Sequence
  Description of Artificial Sequence: Synthetic oligonucleotide
tatttggagtaaggaggggg

SEQ ID NO: 1672 - DNA, 25 bp, Artificial Sequence
  Description of Artificial Sequence: Synthetic oligonucleotide
aaaggtttagttatgagaagagaga

SEQ ID NO: 1673 - DNA, 23 bp, Artificial Sequence
  Description of Artificial Sequence: Synthetic oligonucleotide
aaaagtaagagaaaataaaggtt

SEQ ID NO: 1674 - DNA, 24 bp, Artificial Sequence
  Description of Artificial Sequence: Synthetic oligonucleotide
aaggtttagttatgagaagagaga

SEQ ID NO: 1675 - DNA, 17 bp, Artificial Sequence
  Description of Artificial Sequence: Synthetic oligonucleotide
ttggagtaaggaggggg

SEQ ID NO: 1676 - DNA, 23 bp, Artificial Sequence
  Description of Artificial Sequence: Synthetic oligonucleotide
aggtttagttatgagaagagaga

SEQ ID NO: 1677 - DNA, 26 bp, Artificial Sequence
  Description of Artificial Sequence: Synthetic oligonucleotide
ggtttagttatgagaagagagataga

SEQ ID NO: 1678 - DNA, 17 bp, Artificial Sequence
  Description of Artificial Sequence: Synthetic oligonucleotide
tttggagtaaggagggg

SEQ ID NO: 1679 - DNA, 25 bp, Artificial Sequence
  Description of Artificial Sequence: Synthetic oligonucleotide
tagttatgagaagagagatagaaat

SEQ ID NO: 1680 - DNA, 27 bp, Artificial Sequence
  Description of Artificial Sequence: Synthetic oligonucleotide
tttagttatgagaagagagatagaaat

SEQ ID NO: 1681 - DNA, 28 bp, Artificial Sequence
  Description of Artificial Sequence: Synthetic oligonucleotide
gtttagttatgagaagagagatagaaat

SEQ ID NO: 1682 - DNA, 26 bp, Artificial Sequence
  Description of Artificial Sequence: Synthetic oligonucleotide
ttagttatgagaagagagatagaaat

SEQ ID NO: 1683 - DNA, 23 bp, Artificial Sequence
  Description of Artificial Sequence: Synthetic oligonucleotide
caactaaatatcaaaacaatcac

SEQ ID NO: 1684 - DNA, 19 bp, Artificial Sequence
  Description of Artificial Sequence: Synthetic oligonucleotide
aatcaccacctcacaaccc

SEQ ID NO: 1685 - DNA, 20 bp, Artificial Sequence
  Description of Artificial Sequence: Synthetic oligonucleotide
aatcaccacctcacaaccct

SEQ ID NO: 1686 - DNA, 20 bp, Artificial Sequence
  Description of Artificial Sequence: Synthetic oligonucleotide
caatcaccacctcacaaccc

SEQ ID NO: 1687 - DNA, 21 bp, Artificial Sequence
  Description of Artificial Sequence: Synthetic oligonucleotide
acaatcaccacctcacaaccc

SEQ ID NO: 1688 - DNA, 21 bp, Artificial Sequence
  Description of Artificial Sequence: Synthetic oligonucleotide
caatcaccacctcacaaccct

SEQ ID NO: 1689 - DNA, 21 bp, Artificial Sequence
  Description of Artificial Sequence: Synthetic oligonucleotide
aaacaatcaccacctcacaac

SEQ ID NO: 1690 - DNA, 21 bp, Artificial Sequence
  Description of Artificial Sequence: Synthetic oligonucleotide
aatcaccacctcacaacccta

SEQ ID NO: 1691 - DNA, 22 bp, Artificial Sequence
  Description of Artificial Sequence: Synthetic oligonucleotide
caatcaccacctcacaacccta

SEQ ID NO: 1692 - DNA, 22 bp, Artificial Sequence
  Description of Artificial Sequence: Synthetic oligonucleotide
aatcaccacctcacaaccctac

SEQ ID NO: 1693 - DNA, 22 bp, Artificial Sequence
  Description of Artificial Sequence: Synthetic oligonucleotide
acaatcaccacctcacaaccct

SEQ ID NO: 1694 - DNA, 23 bp, Artificial Sequence
  Description of Artificial Sequence: Synthetic oligonucleotide
aatcaccacctcacaaccctacc

SEQ ID NO: 1695 - DNA, 23 bp, Artificial Sequence
  Description of Artificial Sequence: Synthetic oligonucleotide
caatcaccacctcacaaccctac

SEQ ID NO: 1696 - DNA, 23 bp, Artificial Sequence
  Description of Artificial Sequence: Synthetic oligonucleotide
acaatcaccacctcacaacccta

SEQ ID NO: 1697 - DNA, 24 bp, Artificial Sequence
  Description of Artificial Sequence: Synthetic oligonucleotide
acaatcaccacctcacaaccctac

SEQ ID NO: 1698 - DNA, 24 bp, Artificial Sequence
  Description of Artificial Sequence: Synthetic oligonucleotide
aatcaccacctcacaaccctacct

SEQ ID NO: 1699 - DNA, 24 bp, Artificial Sequence
  Description of Artificial Sequence: Synthetic oligonucleotide
caatcaccacctcacaaccctacc

SEQ ID NO: 1700 - DNA, 25 bp, Artificial Sequence
  Description of Artificial Sequence: Synthetic oligonucleotide
aaacaatcaccacctcacaacccta

SEQ ID NO: 1701 - DNA, 25 bp, Artificial Sequence
  Description of Artificial Sequence: Synthetic oligonucleotide
aacaatcaccacctcacaaccctac

SEQ ID NO: 1702 - DNA, 22 bp, Artificial Sequence
  Description of Artificial Sequence: Synthetic oligonucleotide
agtgtgatgtgagggtttattt

SEQ ID NO: 1703 - DNA, 18 bp, Artificial Sequence
  Description of Artificial Sequence: Synthetic oligonucleotide
acaattcacctctacccc

SEQ ID NO: 1704 - DNA, 16 bp, Artificial Sequence
  Description of Artificial Sequence: Synthetic oligonucleotide
tgtttttcgcgcgagt

SEQ ID NO: 1705 - DNA, 16 bp, Artificial Sequence
  Description of Artificial Sequence: Synthetic oligonucleotide
gggggtagaggtgaat

SEQ ID NO: 1706 - DNA, 23 bp, Artificial Sequence
  Description of Artificial Sequence: Synthetic oligonucleotide
ggtttattttgggtgtttgtaga

SEQ ID NO: 1707 - DNA, 19 bp, Artificial Sequence
  Description of Artificial Sequence: Synthetic oligonucleotide
tacaattcacctctacccc

SEQ ID NO: 1708 - DNA, 17 bp, Artificial Sequence
  Description of Artificial Sequence: Synthetic oligonucleotide
caattcacctctacccc

SEQ ID NO: 1709 - DNA, 21 bp, Artificial Sequence
  Description of Artificial Sequence: Synthetic oligonucleotide
gtgtgatgtgagggtttattt

SEQ ID NO: 1710 - DNA, 20 bp, Artificial Sequence
  Description of Artificial Sequence: Synthetic oligonucleotide
tgtgatgtgagggtttattt

SEQ ID NO: 1711 - DNA, 21 bp, Artificial Sequence
  Description of Artificial Sequence: Synthetic oligonucleotide
gagtgtgatgtgagggtttat

SEQ ID NO: 1712 - DNA, 24 bp, Artificial Sequence
  Description of Artificial Sequence: Synthetic oligonucleotide
ggtttattttgggtgtttgtagat

SEQ ID NO: 1713 - DNA, 24 bp, Artificial Sequence
  Description of Artificial Sequence: Synthetic oligonucleotide
tttattttgggtgtttgtagattt

SEQ ID NO: 1714 - DNA, 23 bp, Artificial Sequence
  Description of Artificial Sequence: Synthetic oligonucleotide
gagtgtgatgtgagggtttattt

SEQ ID NO: 1715 - DNA, 24 bp, Artificial Sequence
  Description of Artificial Sequence: Synthetic oligonucleotide
gtttattttgggtgtttgtagatt

SEQ ID NO: 1716 - DNA, 24 bp, Artificial Sequence
  Description of Artificial Sequence: Synthetic oligonucleotide
ttattttgggtgtttgtagatttt

SEQ ID NO: 1717 - DNA, 25 bp, Artificial Sequence
  Description of Artificial Sequence: Synthetic oligonucleotide
tttattttgggtgtttgtagatttt

SEQ ID NO: 1718 - DNA, 25 bp, Artificial Sequence
  Description of Artificial Sequence: Synthetic oligonucleotide
gtttattttgggtgtttgtagattt

SEQ ID NO: 1719 - DNA, 25 bp, Artificial Sequence
  Description of Artificial Sequence: Synthetic oligonucleotide
ggtttattttgggtgtttgtagatt

SEQ ID NO: 1720 - DNA, 21 bp, Artificial Sequence
  Description of Artificial Sequence: Synthetic oligonucleotide
ctttctctcttcccactatcc

SEQ ID NO: 1721 - DNA, 22 bp, Artificial Sequence
  Description of Artificial Sequence: Synthetic oligonucleotide
tagtaagttttgggagttggag

SEQ ID NO: 1722 - DNA, 19 bp, Artificial Sequence
  Description of Artificial Sequence: Synthetic oligonucleotide
ccgtccgccaaacctcgac

SEQ ID NO: 1723 - DNA, 17 bp, Artificial Sequence
  Description of Artificial Sequence: Synthetic oligonucleotide
attacctccaactccca

SEQ ID NO: 1724 - DNA, 24 bp, Artificial Sequence
  Description of Artificial Sequence: Synthetic oligonucleotide
ctatcccatccaccaaacctcaac

SEQ ID NO: 1725 - DNA, 21 bp, Artificial Sequence
  Description of Artificial Sequence: Synthetic oligonucleotide
agtaagttttgggagttggag

SEQ ID NO: 1726 - DNA, 21 bp, Artificial Sequence
  Description of Artificial Sequence: Synthetic oligonucleotide
gttttgggagttggaggtaat

SEQ ID NO: 1727 - DNA, 19 bp, Artificial Sequence
  Description of Artificial Sequence: Synthetic oligonucleotide
accctactaaacaaaatcc

SEQ ID NO: 1728 - DNA, 20 bp, Artificial Sequence
  Description of Artificial Sequence: Synthetic oligonucleotide
ttttgggagttggaggtaat

SEQ ID NO: 1729 - DNA, 19 bp, Artificial Sequence
  Description of Artificial Sequence: Synthetic oligonucleotide
tttgggagttggaggtaat

SEQ ID NO: 1730 - DNA, 22 bp, Artificial Sequence
  Description of Artificial Sequence: Synthetic oligonucleotide
agttttgggagttggaggtaat

SEQ ID NO: 1731 - DNA, 23 bp, Artificial Sequence
  Description of Artificial Sequence: Synthetic oligonucleotide
gtagtaagttttgggagttggag

SEQ ID NO: 1732 - DNA, 22 bp, Artificial Sequence
  Description of Artificial Sequence: Synthetic oligonucleotide
taagttttgggagttggaggta

SEQ ID NO: 1733 - DNA, 20 bp, Artificial Sequence
  Description of Artificial Sequence: Synthetic oligonucleotide
gtaagttttgggagttggag

SEQ ID NO: 1734 - DNA, 21 bp, Artificial Sequence
  Description of Artificial Sequence: Synthetic oligonucleotide
ggattttgtttagtagggttt

SEQ ID NO: 1735 - DNA, 16 bp, Artificial Sequence
  Description of Artificial Sequence: Synthetic oligonucleotide
ccctccaacccgaaac

SEQ ID NO: 1736 - DNA, 21 bp, Artificial Sequence
  Description of Artificial Sequence: Synthetic oligonucleotide
aagttttgggagttggaggta

SEQ ID NO: 1737 - DNA, 18 bp, Artificial Sequence
  Description of Artificial Sequence: Synthetic oligonucleotide
ttgggagttggaggtaat

SEQ ID NO: 1738 - DNA, 22 bp, Artificial Sequence
  Description of Artificial Sequence: Synthetic oligonucleotide
cctttctctcttcccactatcc

SEQ ID NO: 1739 - DNA, 20 bp, Artificial Sequence
  Description of Artificial Sequence: Synthetic oligonucleotide
tttctctcttcccactatcc

SEQ ID NO: 1740 - DNA, 22 bp, Artificial Sequence
  Description of Artificial Sequence: Synthetic oligonucleotide
acctttctctcttcccactatc

SEQ ID NO: 1741 - DNA, 25 bp, Artificial Sequence
  Description of Artificial Sequence: Synthetic oligonucleotide
actatcccatccaccaaacctcaac

SEQ ID NO: 1742 - DNA, 21 bp, Artificial Sequence
  Description of Artificial Sequence: Synthetic oligonucleotide
cctttctctcttcccactatc

SEQ ID NO: 1743 - DNA, 23 bp, Artificial Sequence
  Description of Artificial Sequence: Synthetic oligonucleotide
cacctttctctcttcccactatc

SEQ ID NO: 1744 - DNA, 20 bp, Artificial Sequence
  Description of Artificial Sequence: Synthetic oligonucleotide
aagggtaattggtagagggt

SEQ ID NO: 1745 - DNA, 18 bp, Artificial Sequence
  Description of Artificial Sequence: Synthetic oligonucleotide
tccaacccccttaaaaca

SEQ ID NO: 1746 - DNA, 16 bp, Artificial Sequence
  Description of Artificial Sequence: Synthetic oligonucleotide
agggtcgcgggcgttg

SEQ ID NO: 1747 - DNA, 16 bp, Artificial Sequence
  Description of Artificial Sequence: Synthetic oligonucleotide
gggtgggtaggaagaa

SEQ ID NO: 1748 - DNA, 18 bp, Artificial Sequence
  Description of Artificial Sequence: Synthetic oligonucleotide
agagggttgtgggtgttg

SEQ ID NO: 1749 - DNA, 20 bp, Artificial Sequence
  Description of Artificial Sequence: Synthetic oligonucleotide
actccaacccccttaaaaca

SEQ ID NO: 1750 - DNA, 18 bp, Artificial Sequence
  Description of Artificial Sequence: Synthetic oligonucleotide
caacccccttaaaacaaa

SEQ ID NO: 1751 - DNA, 19 bp, Artificial Sequence
  Description of Artificial Sequence: Synthetic oligonucleotide
ccaacccccttaaaacaaa

SEQ ID NO: 1752 - DNA, 19 bp, Artificial Sequence
  Description of Artificial Sequence: Synthetic oligonucleotide
ctccaacccccttaaaaca

SEQ ID NO: 1753 - DNA, 21 bp, Artificial Sequence
  Description of Artificial Sequence: Synthetic oligonucleotide
aactccaacccccttaaaaca

SEQ ID NO: 1754 - DNA, 21 bp, Artificial Sequence
  Description of Artificial Sequence: Synthetic oligonucleotide
aaactccaacccccttaaaac

SEQ ID NO: 1755 - DNA, 18 bp, Artificial Sequence
  Description of Artificial Sequence: Synthetic oligonucleotide
aacccccttaaaacaaac

SEQ ID NO: 1756 - DNA, 19 bp, Artificial Sequence
  Description of Artificial Sequence: Synthetic oligonucleotide
agggtaattggtagagggt

SEQ ID NO: 1757 - DNA, 18 bp, Artificial Sequence
  Description of Artificial Sequence: Synthetic oligonucleotide
gggtaattggtagagggt

SEQ ID NO: 1758 - DNA, 19 bp, Artificial Sequence
  Description of Artificial Sequence: Synthetic oligonucleotide
aatcccactcctaacaaac

SEQ ID NO: 1759 - DNA, 19 bp, Artificial Sequence
  Description of Artificial Sequence: Synthetic oligonucleotide
ggtagagggttgtgggtgt

SEQ ID NO: 1760 - DNA, 19 bp, Artificial Sequence
  Description of Artificial Sequence: Synthetic oligonucleotide
tagagggttgtgggtgttg

SEQ ID NO: 1761 - DNA, 19 bp, Artificial Sequence
  Description of Artificial Sequence: Synthetic oligonucleotide
gtagagggttgtgggtgtt

SEQ ID NO: 1762 - DNA, 20 bp, Artificial Sequence
  Description of Artificial Sequence: Synthetic oligonucleotide
tggtagagggttgtgggtgt

SEQ ID NO: 1763 - DNA, 20 bp, Artificial Sequence
  Description of Artificial Sequence: Synthetic oligonucleotide
gtagagggttgtgggtgttg

SEQ ID NO: 1764 - DNA, 20 bp, Artificial Sequence
  Description of Artificial Sequence: Synthetic oligonucleotide
tagagggttgtgggtgttgg

SEQ ID NO: 1765 - DNA, 20 bp, Artificial Sequence
  Description of Artificial Sequence: Synthetic oligonucleotide
ggtagagggttgtgggtgtt

SEQ ID NO: 1766 - DNA, 16 bp, Artificial Sequence
  Description of Artificial Sequence: Synthetic oligonucleotide
tggggtgtttagggga

SEQ ID NO: 1767 - DNA, 25 bp, Artificial Sequence
  Description of Artificial Sequence: Synthetic oligonucleotide
aattaactctcaatcacctactaat

SEQ ID NO: 1768 - DNA, 16 bp, Artificial Sequence
  Description of Artificial Sequence: Synthetic oligonucleotide
ggtcggtaagtcgcgg

SEQ ID NO: 1769 - DNA, 20 bp, Artificial Sequence
  Description of Artificial Sequence: Synthetic oligonucleotide
gttattagtaggtgattgag

SEQ ID NO: 1770 - DNA, 17 bp, Artificial Sequence
  Description of Artificial Sequence: Synthetic oligonucleotide
aggggagtgtgtgggtt

SEQ ID NO: 1771 - DNA, 24 bp, Artificial Sequence
  Description of Artificial Sequence: Synthetic oligonucleotide
attaactctcaatcacctactaat

SEQ ID NO: 1772 - DNA, 26 bp, Artificial Sequence
  Description of Artificial Sequence: Synthetic oligonucleotide
aactctcaatcacctactaataacaa

SEQ ID NO: 1773 - DNA, 21 bp, Artificial Sequence
  Description of Artificial Sequence: Synthetic oligonucleotide
gttgttattagtaggtgattg

SEQ ID NO: 1774 - DNA, 23 bp, Artificial Sequence
  Description of Artificial Sequence: Synthetic oligonucleotide
tctcaatcacctactaataacaa

SEQ ID NO: 1775 - DNA, 24 bp, Artificial Sequence
  Description of Artificial Sequence: Synthetic oligonucleotide
ctctcaatcacctactaataacaa

SEQ ID NO: 1776 - DNA, 25 bp, Artificial Sequence
  Description of Artificial Sequence: Synthetic oligonucleotide
actctcaatcacctactaataacaa

SEQ ID NO: 1777 - DNA, 27 bp, Artificial Sequence
  Description of Artificial Sequence: Synthetic oligonucleotide
taactctcaatcacctactaataacaa

SEQ ID NO: 1778 - DNA, 25 bp, Artificial Sequence
  Description of Artificial Sequence: Synthetic oligonucleotide
ttaactctcaatcacctactaataa

SEQ ID NO: 1779 - DNA, 18 bp, Artificial Sequence
  Description of Artificial Sequence: Synthetic oligonucleotide
ttggggtgtttaggggag

SEQ ID NO: 1780 - DNA, 16 bp, Artificial Sequence
  Description of Artificial Sequence: Synthetic oligonucleotide
ggggtgtttaggggag

SEQ ID NO: 1781 - DNA, 19 bp, Artificial Sequence
  Description of Artificial Sequence: Synthetic oligonucleotide
tttggggtgtttaggggag

SEQ ID NO: 1782 - DNA, 18 bp, Artificial Sequence
  Description of Artificial Sequence: Synthetic oligonucleotide
ttaggggagtgtgtgggt

SEQ ID NO: 1783 - DNA, 17 bp, Artificial Sequence
  Description of Artificial Sequence: Synthetic oligonucleotide
ttttggggtgtttaggg

SEQ ID NO: 1784 - DNA, 17 bp, Artificial Sequence
  Description of Artificial Sequence: Synthetic oligonucleotide
tttggggtgtttagggg

SEQ ID NO: 1785 - DNA, 18 bp, Artificial Sequence
  Description of Artificial Sequence: Synthetic oligonucleotide
aggggagtgtgtgggttt

SEQ ID NO: 1786 - DNA, 18 bp, Artificial Sequence
  Description of Artificial Sequence: Synthetic oligonucleotide
taggggagtgtgtgggtt

SEQ ID NO: 1787 - DNA, 18 bp, Artificial Sequence
  Description of Artificial Sequence: Synthetic oligonucleotide
ttttggggtgtttagggg

SEQ ID NO: 1788 - DNA, 19 bp, Artificial Sequence
  Description of Artificial Sequence: Synthetic oligonucleotide
taggggagtgtgtgggttt

SEQ ID NO: 1789 - DNA, 19 bp, Artificial Sequence
  Description of Artificial Sequence: Synthetic oligonucleotide
aggggagtgtgtgggtttt

SEQ ID NO: 1790 - DNA, 19 bp, Artificial Sequence
  Description of Artificial Sequence: Synthetic oligonucleotide
ttaggggagtgtgtgggtt

SEQ ID NO: 1791 - DNA, 22 bp, Artificial Sequence
  Description of Artificial Sequence: Synthetic oligonucleotide
taattgttttggggtgtttagg

SEQ ID NO: 1792 - DNA, 19 bp, Artificial Sequence
  Description of Artificial Sequence: Synthetic oligonucleotide
tttaggggagtgtgtgggt

SEQ ID NO: 1793 - DNA, 21 bp, Artificial Sequence
  Description of Artificial Sequence: Synthetic oligonucleotide
aattgttttggggtgtttagg

SEQ ID NO: 1794 - DNA, 23 bp, Artificial Sequence
  Description of Artificial Sequence: Synthetic oligonucleotide
ttaattgttttggggtgtttagg

SEQ ID NO: 1795 - DNA, 20 bp, Artificial Sequence
  Description of Artificial Sequence: Synthetic oligonucleotide
gtttaggggagtgtgtgggt

SEQ ID NO: 1796 - DNA, 20 bp, Artificial Sequence
  Description of Artificial Sequence: Synthetic oligonucleotide
ttaggggagtgtgtgggttt

SEQ ID NO: 1797 - DNA, 20 bp, Artificial Sequence
  Description of Artificial Sequence: Synthetic oligonucleotide
taggggagtgtgtgggtttt

SEQ ID NO: 1798 - DNA, 20 bp, Artificial Sequence
  Description of Artificial Sequence: Synthetic oligonucleotide
tttaggggagtgtgtgggtt

SEQ ID NO: 1799 - DNA, 21 bp, Artificial Sequence
  Description of Artificial Sequence: Synthetic oligonucleotide
tttaggggagtgtgtgggttt

SEQ ID NO: 1800 - DNA, 21 bp, Artificial Sequence
  Description of Artificial Sequence: Synthetic oligonucleotide
ttaggggagtgtgtgggtttt

SEQ ID NO: 1801 - DNA, 22 bp, Artificial Sequence
  Description of Artificial Sequence: Synthetic oligonucleotide
atttttaggtggggtttagatt

SEQ ID NO: 1802 - DNA, 17 bp, Artificial Sequence
  Description of Artificial Sequence: Synthetic oligonucleotide
tccccaattccctaacc

SEQ ID NO: 1803 - DNA, 18 bp, Artificial Sequence
  Description of Artificial Sequence: Synthetic oligonucleotide
aggtcgttgcgggttcgg

SEQ ID NO: 1804 - DNA, 18 bp, Artificial Sequence
  Description of Artificial Sequence: Synthetic oligonucleotide
gggttagggaattgggga

SEQ ID NO: 1805 - DNA, 21 bp, Artificial Sequence
  Description of Artificial Sequence: Synthetic oligonucleotide
tagatttgaggttgttgtggg

SEQ ID NO: 1806 - DNA, 17 bp, Artificial Sequence
  Description of Artificial Sequence: Synthetic oligonucleotide
cctccccaattccctaa

SEQ ID NO: 1807 - DNA, 17 bp, Artificial Sequence
  Description of Artificial Sequence: Synthetic oligonucleotide
gttagggaattggggag

SEQ ID NO: 1808 - DNA, 18 bp, Artificial Sequence
  Description of Artificial Sequence: Synthetic oligonucleotide
ctccccaattccctaacc

SEQ ID NO: 1809 - DNA, 17 bp, Artificial Sequence
  Description of Artificial Sequence: Synthetic oligonucleotide
aatttcccctccccaat

SEQ ID NO: 1810 - DNA, 16 bp, Artificial Sequence
  Description of Artificial Sequence: Synthetic oligonucleotide
tagggaattggggagg

SEQ ID NO: 1811 - DNA, 18 bp, Artificial Sequence
  Description of Artificial Sequence: Synthetic oligonucleotide
atttcccctccccaattc

SEQ ID NO: 1812 - DNA, 16 bp, Artificial Sequence
  Description of Artificial Sequence: Synthetic oligonucleotide
ccccaattccctaacc

SEQ ID NO: 1813 - DNA, 17 bp, Artificial Sequence
  Description of Artificial Sequence: Synthetic oligonucleotide
tttcccctccccaattc

SEQ ID NO: 1814 - DNA, 17 bp, Artificial Sequence
  Description of Artificial Sequence: Synthetic oligonucleotide
ccctccccaattcccta

SEQ ID NO: 1815 - DNA, 23 bp, Artificial Sequence
  Description of Artificial Sequence: Synthetic oligonucleotide
tatttttaggtggggtttagatt

SEQ ID NO: 1816 - DNA, 21 bp, Artificial Sequence
  Description of Artificial Sequence: Synthetic oligonucleotide
tttttaggtggggtttagatt

SEQ ID NO: 1817 - DNA, 20 bp, Artificial Sequence
  Description of Artificial Sequence: Synthetic oligonucleotide
ttttaggtggggtttagatt

SEQ ID NO: 1818 - DNA, 19 bp, Artificial Sequence
  Description of Artificial Sequence: Synthetic oligonucleotide
tttaggtggggtttagatt

SEQ ID NO: 1819 - DNA, 22 bp, Artificial Sequence
  Description of Artificial Sequence: Synthetic oligonucleotide
ttagatttgaggttgttgtggg

SEQ ID NO: 1820 - DNA, 23 bp, Artificial Sequence
  Description of Artificial Sequence: Synthetic oligonucleotide
ttatttttaggtggggtttagat

SEQ ID NO: 1821 - DNA, 22 bp, Artificial Sequence
  Description of Artificial Sequence: Synthetic oligonucleotide
tttagatttgaggttgttgtgg

SEQ ID NO: 1822 - DNA, 22 bp, Artificial Sequence
  Description of Artificial Sequence: Synthetic oligonucleotide
ttatttttaggtggggtttaga

SEQ ID NO: 1823 - DNA, 22 bp, Artificial Sequence
  Description of Artificial Sequence: Synthetic oligonucleotide
tagatttgaggttgttgtgggt

SEQ ID NO: 1824 - DNA, 23 bp, Artificial Sequence
  Description of Artificial Sequence: Synthetic oligonucleotide
gtttagatttgaggttgttgtgg

SEQ ID NO: 1825 - DNA, 23 bp, Artificial Sequence
  Description of Artificial Sequence: Synthetic oligonucleotide
tagatttgaggttgttgtgggtt

SEQ ID NO: 1826 - DNA, 23 bp, Artificial Sequence
  Description of Artificial Sequence: Synthetic oligonucleotide
tttagatttgaggttgttgtggg

SEQ ID NO: 1827 - DNA, 23 bp, Artificial Sequence
  Description of Artificial Sequence: Synthetic oligonucleotide
ttagatttgaggttgttgtgggt

SEQ ID NO: 1828 - DNA, 24 bp, Artificial Sequence
  Description of Artificial Sequence: Synthetic oligonucleotide
gtttagatttgaggttgttgtggg

SEQ ID NO: 1829 - DNA, 24 bp, Artificial Sequence
  Description of Artificial Sequence: Synthetic oligonucleotide
ggtttagatttgaggttgttgtgg

SEQ ID NO: 1830 - DNA, 22 bp, Artificial Sequence
  Description of Artificial Sequence: Synthetic oligonucleotide
acttctcacacatactttccct

SEQ ID NO: 1831 - DNA, 22 bp, Artificial Sequence
  Description of Artificial Sequence: Synthetic oligonucleotide
gtttggtagggagttgtttatt

SEQ ID NO: 1832 - DNA, 16 bp, Artificial Sequence
  Description of Artificial Sequence: Synthetic oligonucleotide
acgaaactacgcgcaa

SEQ ID NO: 1833 - DNA, 17 bp, Artificial Sequence
  Description of Artificial Sequence: Synthetic oligonucleotide
caacttctcccatactc

SEQ ID NO: 1834 - DNA, 25 bp, Artificial Sequence
  Description of Artificial Sequence: Synthetic oligonucleotide
tttccctaaaacaaaactacacaca

SEQ ID NO: 1835 - DNA, 22 bp, Artificial Sequence
  Description of Artificial Sequence: Synthetic oligonucleotide
aattggtttagagaaagaaagg

SEQ ID NO: 1836 - DNA, 16 bp, Artificial Sequence
  Description of Artificial Sequence: Synthetic oligonucleotide
tccctaccaaaccacc

SEQ ID NO: 1837 - DNA, 23 bp, Artificial Sequence
  Description of Artificial Sequence: Synthetic oligonucleotide
tttggtagggagttgtttattag

SEQ ID NO: 1838 - DNA, 23 bp, Artificial Sequence
  Description of Artificial Sequence: Synthetic oligonucleotide
gggagttgtttattagagattga

SEQ ID NO: 1839 - DNA, 22 bp, Artificial Sequence
  Description of Artificial Sequence: Synthetic oligonucleotide
ggtttggtagggagttgtttat

SEQ ID NO: 1840 - DNA, 22 bp, Artificial Sequence
  Description of Artificial Sequence: Synthetic oligonucleotide
ttggtagggagttgtttattag

SEQ ID NO: 1841 - DNA, 23 bp, Artificial Sequence
  Description of Artificial Sequence: Synthetic oligonucleotide
taattggtttagagaaagaaagg

SEQ ID NO: 1842 - DNA, 22 bp, Artificial Sequence
  Description of Artificial Sequence: Synthetic oligonucleotide
gtgggtatggttataggagaat

SEQ ID NO: 1843 - DNA, 24 bp, Artificial Sequence
  Description of Artificial Sequence: Synthetic oligonucleotide
agggagttgtttattagagattga

SEQ ID NO: 1844 - DNA, 22 bp, Artificial Sequence
  Description of Artificial Sequence: Synthetic oligonucleotide
attggtttagagaaagaaaggt

SEQ ID NO: 1845 - DNA, 23 bp, Artificial Sequence
  Description of Artificial Sequence: Synthetic oligonucleotide
tggtagggagttgtttattagag

SEQ ID NO: 1846 - DNA, 24 bp, Artificial Sequence
  Description of Artificial Sequence: Synthetic oligonucleotide
ggagttgtttattagagattgaga

SEQ ID NO: 1847 - DNA, 22 bp, Artificial Sequence
  Description of Artificial Sequence: Synthetic oligonucleotide
ggtgggtatggttataggagaa

SEQ ID NO: 1848 - DNA, 24 bp, Artificial Sequence
  Description of Artificial Sequence: Synthetic oligonucleotide
ttaattggtttagagaaagaaagg

SEQ ID NO: 1849 - DNA, 25 bp, Artificial Sequence
  Description of Artificial Sequence: Synthetic oligonucleotide
ggtagggagttgtttattagagatt

SEQ ID NO: 1850 - DNA, 25 bp, Artificial Sequence
  Description of Artificial Sequence: Synthetic oligonucleotide
tagggagttgtttattagagattga

SEQ ID NO: 1851 - DNA, 22 bp, Artificial Sequence
  Description of Artificial Sequence: Synthetic oligonucleotide
tggtttggtagggagttgttta

SEQ ID NO: 1852 - DNA, 22 bp, Artificial Sequence
  Description of Artificial Sequence: Synthetic oligonucleotide
gataggtaggtgggtatggtta

SEQ ID NO: 1853 - DNA, 21 bp, Artificial Sequence
  Description of Artificial Sequence: Synthetic oligonucleotide
ttggtttagagaaagaaaggt

SEQ ID NO: 1854 - DNA, 21 bp, Artificial Sequence
  Description of Artificial Sequence: Synthetic oligonucleotide
tgggtatggttataggagaat

SEQ ID NO: 1855 - DNA, 21 bp, Artificial Sequence
  Description of Artificial Sequence: Synthetic oligonucleotide
gtggtttggtagggagttgtt

SEQ ID NO: 1856 - DNA, 20 bp, Artificial Sequence
  Description of Artificial Sequence: Synthetic oligonucleotide
aaagaaaggtggtttggtag

SEQ ID NO: 1857 - DNA, 18 bp, Artificial Sequence
  Description of Artificial Sequence: Synthetic oligonucleotide
tatggaggtggggatttt

SEQ ID NO: 1858 - DNA, 18 bp, Artificial Sequence
  Description of Artificial Sequence: Synthetic oligonucleotide
ttatggaggtggggattt

SEQ ID NO: 1859 - DNA, 18 bp, Artificial Sequence
  Description of Artificial Sequence: Synthetic oligonucleotide
tttatggaggtggggatt

SEQ ID NO: 1860 - DNA, 18 bp, Artificial Sequence
  Description of Artificial Sequence: Synthetic oligonucleotide
ttttatggaggtggggat

SEQ ID NO: 1861 - DNA, 19 bp, Artificial Sequence
  Description of Artificial Sequence: Synthetic oligonucleotide
gttttatggaggtggggat

SEQ ID NO: 1862 - DNA, 24 bp, Artificial Sequence
  Description of Artificial Sequence: Synthetic oligonucleotide
gtagggagttgtttattagagatt

SEQ ID NO: 1863 - DNA, 22 bp, Artificial Sequence
  Description of Artificial Sequence: Synthetic oligonucleotide
aggtaggtgggtatggttatag

SEQ ID NO: 1864 - DNA, 24 bp, Artificial Sequence
  Description of Artificial Sequence: Synthetic oligonucleotide
gttaattggtttagagaaagaaag

SEQ ID NO: 1865 - DNA, 18 bp, Artificial Sequence
  Description of Artificial Sequence: Synthetic oligonucleotide
aaaggtggtttggtaggg

SEQ ID NO: 1866 - DNA, 18 bp, Artificial Sequence
  Description of Artificial Sequence: Synthetic oligonucleotide
aggtggtttggtagggag

SEQ ID NO: 1867 - DNA, 17 bp, Artificial Sequence
  Description of Artificial Sequence: Synthetic oligonucleotide
acaactccctaccaaac

SEQ ID NO: 1868 - DNA, 20 bp, Artificial Sequence
  Description of Artificial Sequence: Synthetic oligonucleotide
gagaggataggtaggtgggt

SEQ ID NO: 1869 - DNA, 20 bp, Artificial Sequence
  Description of Artificial Sequence: Synthetic oligonucleotide
agaggataggtaggtgggta

SEQ ID NO: 1870 - DNA, 18 bp, Artificial Sequence
  Description of Artificial Sequence: Synthetic oligonucleotide
aaggtggtttggtaggga

SEQ ID NO: 1871 - DNA, 16 bp, Artificial Sequence
  Description of Artificial Sequence: Synthetic oligonucleotide
ctccctaccaaaccac

SEQ ID NO: 1872 - DNA, 19 bp, Artificial Sequence
  Description of Artificial Sequence: Synthetic oligonucleotide
ggtggtttggtagggagtt

SEQ ID NO: 1873 - DNA, 19 bp, Artificial Sequence
  Description of Artificial Sequence: Synthetic oligonucleotide
gttgttttatggaggtggg

SEQ ID NO: 1874 - DNA, 17 bp, Artificial Sequence
  Description of Artificial Sequence: Synthetic oligonucleotide
atggaggtggggatttt

SEQ ID NO: 1875 - DNA, 22 bp, Artificial Sequence
  Description of Artificial Sequence: Synthetic oligonucleotide
ataggtaggtgggtatggttat

SEQ ID NO: 1876 - DNA, 20 bp, Artificial Sequence
  Description of Artificial Sequence: Synthetic oligonucleotide
agttgttttatggaggtggg

SEQ ID NO: 1877 - DNA, 23 bp, Artificial Sequence
  Description of Artificial Sequence: Synthetic oligonucleotide
taggtaggtgggtatggttatag

SEQ ID NO: 1878 - DNA, 21 bp, Artificial Sequence
  Description of Artificial Sequence: Synthetic oligonucleotide
ggataggtaggtgggtatggt

SEQ ID NO: 1879 - DNA, 22 bp, Artificial Sequence
  Description of Artificial Sequence: Synthetic oligonucleotide
aggataggtaggtgggtatggt

SEQ ID NO: 1880 - DNA, 20 bp, Artificial Sequence
  Description of Artificial Sequence: Synthetic oligonucleotide
gaggataggtaggtgggtat

SEQ ID NO: 1881 - DNA, 24 bp, Artificial Sequence
  Description of Artificial Sequence: Synthetic oligonucleotide
tgttaattggtttagagaaagaaa

SEQ ID NO: 1882 - DNA, 23 bp, Artificial Sequence
  Description of Artificial Sequence: Synthetic oligonucleotide
gagttgtttattagagattgaga

SEQ ID NO: 1883 - DNA, 20 bp, Artificial Sequence
  Description of Artificial Sequence: Synthetic oligonucleotide
tgttttatggaggtggggat

SEQ ID NO: 1884 - DNA, 17 bp, Artificial Sequence
  Description of Artificial Sequence: Synthetic oligonucleotide
tggaggtggggattttt

SEQ ID NO: 1885 - DNA, 22 bp, Artificial Sequence
  Description of Artificial Sequence: Synthetic oligonucleotide
cacttctcacacatactttccc

SEQ ID NO: 1886 - DNA, 21 bp, Artificial Sequence
  Description of Artificial Sequence: Synthetic oligonucleotide
cttctcacacatactttccct

SEQ ID NO: 1887 - DNA, 21 bp, Artificial Sequence
  Description of Artificial Sequence: Synthetic oligonucleotide
tagttgttttatggaggtggg

SEQ ID NO: 1888 - DNA, 22 bp, Artificial Sequence
  Description of Artificial Sequence: Synthetic oligonucleotide
ctcacacatactttccctaaaa

SEQ ID NO: 1889 - DNA, 22 bp, Artificial Sequence
  Description of Artificial Sequence: Synthetic oligonucleotide
agttagttgttttatggaggtg

SEQ ID NO: 1890 - DNA, 21 bp, Artificial Sequence
  Description of Artificial Sequence: Synthetic oligonucleotide
gttagttgttttatggaggtg

SEQ ID NO: 1891 - DNA, 22 bp, Artificial Sequence
  Description of Artificial Sequence: Synthetic oligonucleotide
ttagttgttttatggaggtggg

SEQ ID NO: 1892 - DNA, 23 bp, Artificial Sequence
  Description of Artificial Sequence: Synthetic oligonucleotide
tctcacacatactttccctaaaa

SEQ ID NO: 1893 - DNA, 20 bp, Artificial Sequence
  Description of Artificial Sequence: Synthetic oligonucleotide
ttctcacacatactttccct

SEQ ID NO: 1894 - DNA, 21 bp, Artificial Sequence
  Description of Artificial Sequence: Synthetic oligonucleotide
tcacacatactttccctaaaa

SEQ ID NO: 1895 - DNA, 23 bp, Artificial Sequence
  Description of Artificial Sequence: Synthetic oligonucleotide
aagttagttgttttatggaggtg

SEQ ID NO: 1896 - DNA, 26 bp, Artificial Sequence
  Description of Artificial Sequence: Synthetic oligonucleotide
ctttccctaaaacaaaactacacaca

SEQ ID NO: 1897 - DNA, 22 bp, Artificial Sequence
  Description of Artificial Sequence: Synthetic oligonucleotide
ccacttctcacacatactttcc

SEQ ID NO: 1898 - DNA, 23 bp, Artificial Sequence
  Description of Artificial Sequence: Synthetic oligonucleotide
accacttctcacacatactttcc

SEQ ID NO: 1899 - DNA, 22 bp, Artificial Sequence
  Description of Artificial Sequence: Synthetic oligonucleotide
tataagaaagatgtgggggaga

SEQ ID NO: 1900 - DNA, 19 bp, Artificial Sequence
  Description of Artificial Sequence: Synthetic oligonucleotide
aattcatccaacaatccaa

SEQ ID NO: 1901 - DNA, 16 bp, Artificial Sequence
  Description of Artificial Sequence: Synthetic oligonucleotide
gaagtcgcgcgttgga

SEQ ID NO: 1902 - DNA, 17 bp, Artificial Sequence
  Description of Artificial Sequence: Synthetic oligonucleotide
aaagatgtgggggagat

SEQ ID NO: 1903 - DNA, 22 bp, Artificial Sequence
  Description of Artificial Sequence: Synthetic oligonucleotide
gggagattttgatgtttgtgtt

SEQ ID NO: 1904 - DNA, 19 bp, Artificial Sequence
  Description of Artificial Sequence: Synthetic oligonucleotide
aaattcatccaacaatcca

SEQ ID NO: 1905 - DNA, 18 bp, Artificial Sequence
  Description of Artificial Sequence: Synthetic oligonucleotide
attcatccaacaatccaa

SEQ ID NO: 1906 - DNA, 17 bp, Artificial Sequence
  Description of Artificial Sequence: Synthetic oligonucleotide
ttcatccaacaatccaa

SEQ ID NO: 1907 - DNA, 22 bp, Artificial Sequence
  Description of Artificial Sequence: Synthetic oligonucleotide
ataagaaagatgtgggggagat

SEQ ID NO: 1908 - DNA, 17 bp, Artificial Sequence
  Description of Artificial Sequence: Synthetic oligonucleotide
agatgtgggggagattt

SEQ ID NO: 1909 - DNA, 21 bp, Artificial Sequence
  Description of Artificial Sequence: Synthetic oligonucleotide
taagaaagatgtgggggagat

SEQ ID NO: 1910 - DNA, 19 bp, Artificial Sequence
  Description of Artificial Sequence: Synthetic oligonucleotide
aaagatgtgggggagattt

SEQ ID NO: 1911 - DNA, 18 bp, Artificial Sequence
  Description of Artificial Sequence: Synthetic oligonucleotide
aggtggaggcggggtgta

SEQ ID NO: 1912 - DNA, 19 bp, Artificial Sequence
  Description of Artificial Sequence: Synthetic oligonucleotide
agaaagatgtgggggagat

SEQ ID NO: 1913 - DNA, 19 bp, Artificial Sequence
  Description of Artificial Sequence: Synthetic oligonucleotide
gaaagatgtgggggagatt

SEQ ID NO: 1914 - DNA, 20 bp, Artificial Sequence
  Description of Artificial Sequence: Synthetic oligonucleotide
aagaaagatgtgggggagat

SEQ ID NO: 1915 - DNA, 17 bp, Artificial Sequence
  Description of Artificial Sequence: Synthetic oligonucleotide
aagatgtgggggagatt

SEQ ID NO: 1916 - DNA, 21 bp, Artificial Sequence
  Description of Artificial Sequence: Synthetic oligonucleotide
tataagaaagatgtgggggag

SEQ ID NO: 1917 - DNA, 22 bp, Artificial Sequence
  Description of Artificial Sequence: Synthetic oligonucleotide
ggggagattttgatgtttgtgt

SEQ ID NO: 1918 - DNA, 20 bp, Artificial Sequence
  Description of Artificial Sequence: Synthetic oligonucleotide
ataagaaagatgtgggggag

SEQ ID NO: 1919 - DNA, 19 bp, Artificial Sequence
  Description of Artificial Sequence: Synthetic oligonucleotide
taagaaagatgtgggggag

SEQ ID NO: 1920 - DNA, 18 bp, Artificial Sequence
  Description of Artificial Sequence: Synthetic oligonucleotide
aagaaagatgtgggggag

SEQ ID NO: 1921 - DNA, 23 bp, Artificial Sequence
  Description of Artificial Sequence: Synthetic oligonucleotide
ggggagattttgatgtttgtgtt

SEQ ID NO: 1922 - DNA, 20 bp, Artificial Sequence
  Description of Artificial Sequence: Synthetic oligonucleotide
ttatttggtgggggtagtag

SEQ ID NO: 1923 - DNA, 17 bp, Artificial Sequence
  Description of Artificial Sequence: Synthetic oligonucleotide
cctaaacccaaaccctt

SEQ ID NO: 1924 - DNA, 18 bp, Artificial Sequence
  Description of Artificial Sequence: Synthetic oligonucleotide
ggcgttatcgattttcgt

SEQ ID NO: 1925 - DNA, 16 bp, Artificial Sequence
  Description of Artificial Sequence: Synthetic oligonucleotide
gacgcggagcgcgtta

SEQ ID NO: 1926 - DNA, 25 bp, Artificial Sequence
  Description of Artificial Sequence: Synthetic oligonucleotide
ggtagtaggtgttattgatttttgt

SEQ ID NO: 1927 - DNA, 19 bp, Artificial Sequence
  Description of Artificial Sequence: Synthetic oligonucleotide
tatttggtgggggtagtag

SEQ ID NO: 1928 - DNA, 18 bp, Artificial Sequence
  Description of Artificial Sequence: Synthetic oligonucleotide
atttggtgggggtagtag

SEQ ID NO: 1929 - DNA, 17 bp, Artificial Sequence
  Description of Artificial Sequence: Synthetic oligonucleotide
tttggtgggggtagtag

SEQ ID NO: 1930 - DNA, 25 bp, Artificial Sequence
  Description of Artificial Sequence: Synthetic oligonucleotide
gtagtaggtgttattgatttttgta

SEQ ID NO: 1931 - DNA, 26 bp, Artificial Sequence
  Description of Artificial Sequence: Synthetic oligonucleotide
tagtaggtgttattgatttttgtagt

SEQ ID NO: 1932 - DNA, 26 bp, Artificial Sequence
  Description of Artificial Sequence: Synthetic oligonucleotide
gtagtaggtgttattgatttttgtag

SEQ ID NO: 1933 - DNA, 26 bp, Artificial Sequence
  Description of Artificial Sequence: Synthetic oligonucleotide
ggtagtaggtgttattgatttttgta

SEQ ID NO: 1934 - DNA, 27 bp, Artificial Sequence
  Description of Artificial Sequence: Synthetic oligonucleotide
ggtagtaggtgttattgatttttgtag

SEQ ID NO: 1935 - DNA, 22 bp, Artificial Sequence
  Description of Artificial Sequence: Synthetic oligonucleotide
taccacccacttctcctataaa

SEQ ID NO: 1936 - DNA, 22 bp, Artificial Sequence
  Description of Artificial Sequence: Synthetic oligonucleotide
tgggagagtagtttttagaggt

SEQ ID NO: 1937 - DNA, 21 bp, Artificial Sequence
  Description of Artificial Sequence: Synthetic oligonucleotide
cccgacaaaaaatcccgcgaa

SEQ ID NO: 1938 - DNA, 19 bp, Artificial Sequence
  Description of Artificial Sequence: Synthetic oligonucleotide
ccacttctcctataaaacc

SEQ ID NO: 1939 - DNA, 24 bp, Artificial Sequence
  Description of Artificial Sequence: Synthetic oligonucleotide
tataaaaccacaatcccacccaac

SEQ ID NO: 1940 - DNA, 20 bp, Artificial Sequence
  Description of Artificial Sequence: Synthetic oligonucleotide
gggttgggagagtagttttt

SEQ ID NO: 1941 - DNA, 22 bp, Artificial Sequence
  Description of Artificial Sequence: Synthetic oligonucleotide
gggagagtagtttttagaggtt

SEQ ID NO: 1942 - DNA, 19 bp, Artificial Sequence
  Description of Artificial Sequence: Synthetic oligonucleotide
ggggttgggagagtagttt

SEQ ID NO: 1943 - DNA, 18 bp, Artificial Sequence
  Description of Artificial Sequence: Synthetic oligonucleotide
aaaactactctcccaacc

SEQ ID NO: 1944 - DNA, 22 bp, Artificial Sequence
  Description of Artificial Sequence: Synthetic oligonucleotide
ggagagtagtttttagaggttt

SEQ ID NO: 1945 - DNA, 18 bp, Artificial Sequence
  Description of Artificial Sequence: Synthetic oligonucleotide
gttggggttgggagagta

SEQ ID NO: 1946 - DNA, 16 bp, Artificial Sequence
  Description of Artificial Sequence: Synthetic oligonucleotide
actactctcccaaccc

SEQ ID NO: 1947 - DNA, 18 bp, Artificial Sequence
  Description of Artificial Sequence: Synthetic oligonucleotide
ttggggttgggagagtag

SEQ ID NO: 1948 - DNA, 19 bp, Artificial Sequence
  Description of Artificial Sequence: Synthetic oligonucleotide
tggggttgggagagtagtt

SEQ ID NO: 1949 - DNA, 17 bp, Artificial Sequence
  Description of Artificial Sequence: Synthetic oligonucleotide
aaactactctcccaacc

SEQ ID NO: 1950 - DNA, 25 bp, Artificial Sequence
  Description of Artificial Sequence: Synthetic oligonucleotide
ttgggagagtagtttttagaggttt

SEQ ID NO: 1951 - DNA, 17 bp, Artificial Sequence
  Description of Artificial Sequence: Synthetic oligonucleotide
gggtgatttttggaagg

SEQ ID NO: 1952 - DNA, 19 bp, Artificial Sequence
  Description of Artificial Sequence: Synthetic oligonucleotide
ggttgggagagtagttttt

SEQ ID NO: 1953 - DNA, 21 bp, Artificial Sequence
  Description of Artificial Sequence: Synthetic oligonucleotide
accacccacttctcctataaa

SEQ ID NO: 1954 - DNA, 21 bp, Artificial Sequence
  Description of Artificial Sequence: Synthetic oligonucleotide
ccacccacttctcctataaaa

SEQ ID NO: 1955 - DNA, 22 bp, Artificial Sequence
  Description of Artificial Sequence: Synthetic oligonucleotide
acccacttctcctataaaacca

SEQ ID NO: 1956 - DNA, 19 bp, Artificial Sequence
  Description of Artificial Sequence: Synthetic oligonucleotide
acttctcctataaaaccac

SEQ ID NO: 1957 - DNA, 19 bp, Artificial Sequence
  Description of Artificial Sequence: Synthetic oligonucleotide
cctctaaaaactactctcc

SEQ ID NO: 1958 - DNA, 22 bp, Artificial Sequence
  Description of Artificial Sequence: Synthetic oligonucleotide
cacccacttctcctataaaacc

SEQ ID NO: 1959 - DNA, 21 bp, Artificial Sequence
  Description of Artificial Sequence: Synthetic oligonucleotide
cccacttctcctataaaacca

SEQ ID NO: 1960 - DNA, 23 bp, Artificial Sequence
  Description of Artificial Sequence: Synthetic oligonucleotide
ttaccacccacttctcctataaa

SEQ ID NO: 1961 - DNA, 24 bp, Artificial Sequence
  Description of Artificial Sequence: Synthetic oligonucleotide
cttaccacccacttctcctataaa

SEQ ID NO: 1962 - DNA, 20 bp, Artificial Sequence
  Description of Artificial Sequence: Synthetic oligonucleotide
ccacttctcctataaaacca

SEQ ID NO: 1963 - DNA, 25 bp, Artificial Sequence
  Description of Artificial Sequence: Synthetic oligonucleotide
acttaccacccacttctcctataaa

SEQ ID NO: 1964 - DNA, 26 bp, Artificial Sequence
  Description of Artificial Sequence: Synthetic oligonucleotide
aacttaccacccacttctcctataaa

SEQ ID NO: 1965 - DNA, 22 bp, Artificial Sequence
  Description of Artificial Sequence: Synthetic oligonucleotide
ttaccacccacttctcctataa

SEQ ID NO: 1966 - DNA, 25 bp, Artificial Sequence
  Description of Artificial Sequence: Synthetic oligonucleotide
ctataaaaccacaatcccacccaac

SEQ ID NO: 1967 - DNA, 21 bp, Artificial Sequence
  Description of Artificial Sequence: Synthetic oligonucleotide
taccacccacttctcctataa

SEQ ID NO: 1968 - DNA, 23 bp, Artificial Sequence
  Description of Artificial Sequence: Synthetic oligonucleotide
cttaccacccacttctcctataa

SEQ ID NO: 1969 - DNA, 20 bp, Artificial Sequence
  Description of Artificial Sequence: Synthetic oligonucleotide
accacccacttctcctataa

SEQ ID NO: 1970 - DNA, 24 bp, Artificial Sequence
  Description of Artificial Sequence: Synthetic oligonucleotide
acttaccacccacttctcctataa

SEQ ID NO: 1971 - DNA, 25 bp, Artificial Sequence
  Description of Artificial Sequence: Synthetic oligonucleotide
aacttaccacccacttctcctataa

SEQ ID NO: 1972 - DNA, 26 bp, Artificial Sequence
  Description of Artificial Sequence: Synthetic oligonucleotide
aaacttaccacccacttctcctataa

SEQ ID NO: 1973 - DNA, 25 bp, Artificial Sequence
  Description of Artificial Sequence: Synthetic oligonucleotide
tataaaaccacaatcccacccaaca

SEQ ID NO: 1974 - DNA, 26 bp, Artificial Sequence
  Description of Artificial Sequence: Synthetic oligonucleotide
cctataaaaccacaatcccacccaac

SEQ ID NO: 1975 - DNA, 26 bp, Artificial Sequence
  Description of Artificial Sequence: Synthetic oligonucleotide
ctataaaaccacaatcccacccaaca

SEQ ID NO: 1976 - DNA, 23 bp, Artificial Sequence
  Description of Artificial Sequence: Synthetic oligonucleotide
tttggagaggtagatagtagaag

SEQ ID NO: 1977 - DNA, 22 bp, Artificial Sequence
  Description of Artificial Sequence: Synthetic oligonucleotide
atacaaaatcttccttcctcaa

SEQ ID NO: 1978 - DNA, 18 bp, Artificial Sequence
  Description of Artificial Sequence: Synthetic oligonucleotide
gtcggcgtttttttacgg

SEQ ID NO: 1979 - DNA, 17 bp, Artificial Sequence
  Description of Artificial Sequence: Synthetic oligonucleotide
agggaattgaggaagga

SEQ ID NO: 1980 - DNA, 29 bp, Artificial Sequence
  Description of Artificial Sequence: Synthetic oligonucleotide
tagaagtggatatttttttgtatgtttga

SEQ ID NO: 1981 - DNA, 22 bp, Artificial Sequence
  Description of Artificial Sequence: Synthetic oligonucleotide
tacaaaatcttccttcctcaat

SEQ ID NO: 1982 - DNA, 21 bp, Artificial Sequence
  Description of Artificial Sequence: Synthetic oligonucleotide
acaaaatcttccttcctcaat

SEQ ID NO: 1983 - DNA, 21 bp, Artificial Sequence
  Description of Artificial Sequence: Synthetic oligonucleotide
aaaatcttccttcctcaattc

SEQ ID NO: 1984 - DNA, 22 bp, Artificial Sequence
  Description of Artificial Sequence: Synthetic oligonucleotide
caaaatcttccttcctcaattc

SEQ ID NO: 1985 - DNA, 20 bp, Artificial Sequence
  Description of Artificial Sequence: Synthetic oligonucleotide
ctcacaattttcatccaacc

SEQ ID NO: 1986 - DNA, 19 bp, Artificial Sequence
  Description of Artificial Sequence: Synthetic oligonucleotide
gtggttggatgaaaattgt

SEQ ID NO: 1987 - DNA, 20 bp, Artificial Sequence
  Description of Artificial Sequence: Synthetic oligonucleotide
cctcacaattttcatccaac

SEQ ID NO: 1988 - DNA, 21 bp, Artificial Sequence
  Description of Artificial Sequence: Synthetic oligonucleotide
aaatcttccttcctcaattcc

SEQ ID NO: 1989 - DNA, 21 bp, Artificial Sequence
  Description of Artificial Sequence: Synthetic oligonucleotide
tcctcacaattttcatccaac

SEQ ID NO: 1990 - DNA, 22 bp, Artificial Sequence
  Description of Artificial Sequence: Synthetic oligonucleotide
ctcctcacaattttcatccaac

SEQ ID NO: 1991 - DNA, 20 bp, Artificial Sequence
  Description of Artificial Sequence: Synthetic oligonucleotide
cttcctcaattcccttaaaa

SEQ ID NO: 1992 - DNA, 19 bp, Artificial Sequence
  Description of Artificial Sequence: Synthetic oligonucleotide
gtgttttaagggaattgag

SEQ ID NO: 1993 - DNA, 19 bp, Artificial Sequence
  Description of Artificial Sequence: Synthetic oligonucleotide
tccttcctcaattccctta

SEQ ID NO: 1994 - DNA, 19 bp, Artificial Sequence
  Description of Artificial Sequence: Synthetic oligonucleotide
tcacaattttcatccaacc

SEQ ID NO: 1995 - DNA, 19 bp, Artificial Sequence
  Description of Artificial Sequence: Synthetic oligonucleotide
cacaattttcatccaacca

SEQ ID NO: 1996 - DNA, 21 bp, Artificial Sequence
  Description of Artificial Sequence: Synthetic oligonucleotide
ccttcctcaattcccttaaaa

SEQ ID NO: 1997 - DNA, 18 bp, Artificial Sequence
  Description of Artificial Sequence: Synthetic oligonucleotide
ttccttcctcaattccct

SEQ ID NO: 1998 - DNA, 17 bp, Artificial Sequence
  Description of Artificial Sequence: Synthetic oligonucleotide
aagggaattgaggaagg

SEQ ID NO: 1999 - DNA, 21 bp, Artificial Sequence
  Description of Artificial Sequence: Synthetic oligonucleotide
aatcttccttcctcaattccc

SEQ ID NO: 2000 - DNA, 18 bp, Artificial Sequence
  Description of Artificial Sequence: Synthetic oligonucleotide
cccctccaataccttttt

SEQ ID NO: 2001 - DNA, 17 bp, Artificial Sequence
  Description of Artificial Sequence: Synthetic oligonucleotide
gtattgtatggggggaa

SEQ ID NO: 2002 - DNA, 22 bp, Artificial Sequence
  Description of Artificial Sequence: Synthetic oligonucleotide
accaacatatctaaaaacaaat

SEQ ID NO: 2003 - DNA, 23 bp, Artificial Sequence
  Description of Artificial Sequence: Synthetic oligonucleotide
gtatttgtttttagatatgttgg

SEQ ID NO: 2004 - DNA, 17 bp, Artificial Sequence
  Description of Artificial Sequence: Synthetic oligonucleotide
ccccctccaataccttt

SEQ ID NO: 2005 - DNA, 19 bp, Artificial Sequence
  Description of Artificial Sequence: Synthetic oligonucleotide
ttcctcaattcccttaaaa

SEQ ID NO: 2006 - DNA, 22 bp, Artificial Sequence
  Description of Artificial Sequence: Synthetic oligonucleotide
aaccaacatatctaaaaacaaa

SEQ ID NO: 2007 - DNA, 18 bp, Artificial Sequence
  Description of Artificial Sequence: Synthetic oligonucleotide
acaattttcatccaacca

SEQ ID NO: 2008 - DNA, 18 bp, Artificial Sequence
  Description of Artificial Sequence: Synthetic oligonucleotide
tcctcaattcccttaaaa

SEQ ID NO: 2009 - DNA, 21 bp, Artificial Sequence
  Description of Artificial Sequence: Synthetic oligonucleotide
cctcctcacaattttcatcca

SEQ ID NO: 2010 - DNA, 19 bp, Artificial Sequence
  Description of Artificial Sequence: Synthetic oligonucleotide
ttggatgaaaattgtgagg

SEQ ID NO: 2011 - DNA, 17 bp, Artificial Sequence
  Description of Artificial Sequence: Synthetic oligonucleotide
caattttcatccaacca

SEQ ID NO: 2012 - DNA, 20 bp, Artificial Sequence
  Description of Artificial Sequence: Synthetic oligonucleotide
ccccatacaatacaaaatct

SEQ ID NO: 2013 - DNA, 24 bp, Artificial Sequence
  Description of Artificial Sequence: Synthetic oligonucleotide
atttggagaggtagatagtagaag

SEQ ID NO: 2014 - DNA, 27 bp, Artificial Sequence
  Description of Artificial Sequence: Synthetic oligonucleotide
gatatttggagaggtagatagtagaag

SEQ ID NO: 2015 - DNA, 25 bp, Artificial Sequence
  Description of Artificial Sequence: Synthetic oligonucleotide
tatttggagaggtagatagtagaag

SEQ ID NO: 2016 - DNA, 26 bp, Artificial Sequence
  Description of Artificial Sequence: Synthetic oligonucleotide
atatttggagaggtagatagtagaag

SEQ ID NO: 2017 - DNA, 28 bp, Artificial Sequence
  Description of Artificial Sequence: Synthetic oligonucleotide
ggatatttggagaggtagatagtagaag

SEQ ID NO: 2018 - DNA, 26 bp, Artificial Sequence
  Description of Artificial Sequence: Synthetic oligonucleotide
gtagaagtggatatttttttgtatgt

SEQ ID NO: 2019 - DNA, 26 bp, Artificial Sequence
  Description of Artificial Sequence: Synthetic oligonucleotide
gatatttggagaggtagatagtagaa

SEQ ID NO: 2020 - DNA, 19 bp, Artificial Sequence
  Description of Artificial Sequence: Synthetic oligonucleotide
gagaggtagatagtagaag

SEQ ID NO: 2021 - DNA, 27 bp, Artificial Sequence
  Description of Artificial Sequence: Synthetic oligonucleotide
ggatatttggagaggtagatagtagaa

SEQ ID NO: 2022 - DNA, 26 bp, Artificial Sequence
  Description of Artificial Sequence: Synthetic oligonucleotide
tagaagtggatatttttttgtatgtt

SEQ ID NO: 2023 - DNA, 27 bp, Artificial Sequence
  Description of Artificial Sequence: Synthetic oligonucleotide
agtagaagtggatatttttttgtatgt

SEQ ID NO: 2024 - DNA, 26 bp, Artificial Sequence
  Description of Artificial Sequence: Synthetic oligonucleotide
ggatatttggagaggtagatagtaga

SEQ ID NO: 2025 - DNA, 19 bp, Artificial Sequence
  Description of Artificial Sequence: Synthetic oligonucleotide
ggagaggtagatagtagaa

SEQ ID NO: 2026 - DNA, 27 bp, Artificial Sequence
  Description of Artificial Sequence: Synthetic oligonucleotide
gtagaagtggatatttttttgtatgtt

SEQ ID NO: 2027 - DNA, 23 bp, Artificial Sequence
  Description of Artificial Sequence: Synthetic oligonucleotide
ttacccaaactaaaatacaataa

SEQ ID NO: 2028 - DNA, 22 bp, Artificial Sequence
  Description of Artificial Sequence: Synthetic oligonucleotide
atggtggtatatgtttgtgatg

SEQ ID NO: 2029 - DNA, 16 bp, Artificial Sequence
  Description of Artificial Sequence: Synthetic oligonucleotide
aacgcgatctcgactc

SEQ ID NO: 2030 - DNA, 17 bp, Artificial Sequence
  Description of Artificial Sequence: Synthetic oligonucleotide
attctcctacctcaacc

SEQ ID NO: 2031 - DNA, 23 bp, Artificial Sequence
  Description of Artificial Sequence: Synthetic oligonucleotide
caataacacaatctcaactcacc

SEQ ID NO: 2032 - DNA, 23 bp, Artificial Sequence
  Description of Artificial Sequence: Synthetic oligonucleotide
aattttgatattttgtgaggttg

SEQ ID NO: 2033 - DNA, 22 bp, Artificial Sequence
  Description of Artificial Sequence: Synthetic oligonucleotide
tgatattttgtgaggttgaggt

SEQ ID NO: 2034 - DNA, 23 bp, Artificial Sequence
  Description of Artificial Sequence: Synthetic oligonucleotide
gatattttgtgaggttgaggtag

SEQ ID NO: 2035 - DNA, 22 bp, Artificial Sequence
  Description of Artificial Sequence: Synthetic oligonucleotide
attttgatattttgtgaggttg

SEQ ID NO: 2036 - DNA, 23 bp, Artificial Sequence
  Description of Artificial Sequence: Synthetic oligonucleotide
tatggtggtatatgtttgtgatg

SEQ ID NO: 2037 - DNA, 21 bp, Artificial Sequence
  Description of Artificial Sequence: Synthetic oligonucleotide
ggtatatgtttgtgatgggaa

SEQ ID NO: 2038 - DNA, 21 bp, Artificial Sequence
  Description of Artificial Sequence: Synthetic oligonucleotide
ggtggtatatgtttgtgatgg

SEQ ID NO: 2039 - DNA, 21 bp, Artificial Sequence
  Description of Artificial Sequence: Synthetic oligonucleotide
gtggtatatgtttgtgatggg

SEQ ID NO: 2040 - DNA, 22 bp, Artificial Sequence
  Description of Artificial Sequence: Synthetic oligonucleotide
atattttgtgaggttgaggtag

SEQ ID NO: 2041 - DNA, 24 bp, Artificial Sequence
  Description of Artificial Sequence: Synthetic oligonucleotide
tgtaattttgatattttgtgaggt

SEQ ID NO: 2042 - DNA, 21 bp, Artificial Sequence
  Description of Artificial Sequence: Synthetic oligonucleotide
tggtggtatatgtttgtgatg

SEQ ID NO: 2043 - DNA, 24 bp, Artificial Sequence
  Description of Artificial Sequence: Synthetic oligonucleotide
taattttgatattttgtgaggttg

SEQ ID NO: 2044 - DNA, 22 bp, Artificial Sequence
  Description of Artificial Sequence: Synthetic oligonucleotide
taaaagtagttggtatggtggt

SEQ ID NO: 2045 - DNA, 22 bp, Artificial Sequence
  Description of Artificial Sequence: Synthetic oligonucleotide
aaaagtagttggtatggtggta

SEQ ID NO: 2046 - DNA, 21 bp, Artificial Sequence
  Description of Artificial Sequence: Synthetic oligonucleotide
tggtatatgtttgtgatggga

SEQ ID NO: 2047 - DNA, 21 bp, Artificial Sequence
  Description of Artificial Sequence: Synthetic oligonucleotide
ttttgatattttgtgaggttg

SEQ ID NO: 2048 - DNA, 23 bp, Artificial Sequence
  Description of Artificial Sequence: Synthetic oligonucleotide
ggttgaggtaggtagattatttg

SEQ ID NO: 2049 - DNA, 24 bp, Artificial Sequence
  Description of Artificial Sequence: Synthetic oligonucleotide
aggttgaggtaggtagattatttg

SEQ ID NO: 2050 - DNA, 22 bp, Artificial Sequence
  Description of Artificial Sequence: Synthetic oligonucleotide
aaagtagttggtatggtggtat

SEQ ID NO: 2051 - DNA, 24 bp, Artificial Sequence
  Description of Artificial Sequence: Synthetic oligonucleotide
gtaattttgatattttgtgaggtt

SEQ ID NO: 2052 - DNA, 21 bp, Artificial Sequence
  Description of Artificial Sequence: Synthetic oligonucleotide
tattttgtgaggttgaggtag

SEQ ID NO: 2053 - DNA, 23 bp, Artificial Sequence
  Description of Artificial Sequence: Synthetic oligonucleotide
gtatggtggtatatgtttgtgat

SEQ ID NO: 2054 - DNA, 25 bp, Artificial Sequence
  Description of Artificial Sequence: Synthetic oligonucleotide
ttgtaattttgatattttgtgaggt

SEQ ID NO: 2055 - DNA, 19 bp, Artificial Sequence
  Description of Artificial Sequence: Synthetic oligonucleotide
ggaggttgaggtaggagaa

SEQ ID NO: 2056 - DNA, 25 bp, Artificial Sequence
  Description of Artificial Sequence: Synthetic oligonucleotide
aaaaatataaaagtagttggtatgg

SEQ ID NO: 2057 - DNA, 24 bp, Artificial Sequence
  Description of Artificial Sequence: Synthetic oligonucleotide
ttgatattttgtgaggttgaggta

SEQ ID NO: 2058 - DNA, 26 bp, Artificial Sequence
  Description of Artificial Sequence: Synthetic oligonucleotide
aaaatataaaagtagttggtatggtg

SEQ ID NO: 2059 - DNA, 22 bp, Artificial Sequence
  Description of Artificial Sequence: Synthetic oligonucleotide
ataaaagtagttggtatggtgg

SEQ ID NO: 2060 - DNA, 18 bp, Artificial Sequence
  Description of Artificial Sequence: Synthetic oligonucleotide
gggaggttgaggtaggag

SEQ ID NO: 2061 - DNA, 27 bp, Artificial Sequence
  Description of Artificial Sequence: Synthetic oligonucleotide
ttaaaaatataaaagtagttggtatgg

SEQ ID NO: 2062 - DNA, 20 bp, Artificial Sequence
  Description of Artificial Sequence: Synthetic oligonucleotide
attttgtgaggttgaggtag

SEQ ID NO: 2063 - DNA, 26 bp, Artificial Sequence
  Description of Artificial Sequence: Synthetic oligonucleotide
taaaaatataaaagtagttggtatgg

SEQ ID NO: 2064 - DNA, 25 bp, Artificial Sequence
  Description of Artificial Sequence: Synthetic oligonucleotide
aatataaaagtagttggtatggtgg

SEQ ID NO: 2065 - DNA, 18 bp, Artificial Sequence
  Description of Artificial Sequence: Synthetic oligonucleotide
ttgggaggttgaggtagg

SEQ ID NO: 2066 - DNA, 21 bp, Artificial Sequence
  Description of Artificial Sequence: Synthetic oligonucleotide
gaggttgaggtaggtagatta

SEQ ID NO: 2067 - DNA, 28 bp, Artificial Sequence
  Description of Artificial Sequence: Synthetic oligonucleotide
attaaaaatataaaagtagttggtatgg

SEQ ID NO: 2068 - DNA, 23 bp, Artificial Sequence
  Description of Artificial Sequence: Synthetic oligonucleotide
tataaaagtagttggtatggtgg

SEQ ID NO: 2069 - DNA, 20 bp, Artificial Sequence
  Description of Artificial Sequence: Synthetic oligonucleotide
tttgatattttgtgaggttg

SEQ ID NO: 2070 - DNA, 22 bp, Artificial Sequence
  Description of Artificial Sequence: Synthetic oligonucleotide
gttgaggtaggtagattatttg

SEQ ID NO: 2071 - DNA, 21 bp, Artificial Sequence
  Description of Artificial Sequence: Synthetic oligonucleotide
aagtagttggtatggtggtat

SEQ ID NO: 2072 - DNA, 24 bp, Artificial Sequence
  Description of Artificial Sequence: Synthetic oligonucleotide
atataaaagtagttggtatggtgg

SEQ ID NO: 2073 - DNA, 19 bp, Artificial Sequence
  Description of Artificial Sequence: Synthetic oligonucleotide
tgggaggttgaggtaggag

SEQ ID NO: 2074 - DNA, 29 bp, Artificial Sequence
  Description of Artificial Sequence: Synthetic oligonucleotide
tattaaaaatataaaagtagttggtatgg

SEQ ID NO: 2075 - DNA, 20 bp, Artificial Sequence
  Description of Artificial Sequence: Synthetic oligonucleotide
gtatatgtttgtgatgggaa

SEQ ID NO: 2076 - DNA, 19 bp, Artificial Sequence
  Description of Artificial Sequence: Synthetic oligonucleotide
ttttgtgaggttgaggtag

SEQ ID NO: 2077 - DNA, 26 bp, Artificial Sequence
  Description of Artificial Sequence: Synthetic oligonucleotide
aaatataaaagtagttggtatggtgg

SEQ ID NO: 2078 - DNA, 24 bp, Artificial Sequence
  Description of Artificial Sequence: Synthetic oligonucleotide
attacccaaactaaaatacaataa

SEQ ID NO: 2079 - DNA, 27 bp, Artificial Sequence
  Description of Artificial Sequence: Synthetic oligonucleotide
cttattacccaaactaaaatacaataa

SEQ ID NO: 2080 - DNA, 25 bp, Artificial Sequence
  Description of Artificial Sequence: Synthetic oligonucleotide
tattacccaaactaaaatacaataa

SEQ ID NO: 2081 - DNA, 28 bp, Artificial Sequence
  Description of Artificial Sequence: Synthetic oligonucleotide
tcttattacccaaactaaaatacaataa

SEQ ID NO: 2082 - DNA, 24 bp, Artificial Sequence
  Description of Artificial Sequence: Synthetic oligonucleotide
tacaataacacaatctcaactcac

SEQ ID NO: 2083 - DNA, 26 bp, Artificial Sequence
  Description of Artificial Sequence: Synthetic oligonucleotide
tcttattacccaaactaaaatacaat

SEQ ID NO: 2084 - DNA, 27 bp, Artificial Sequence
  Description of Artificial Sequence: Synthetic oligonucleotide
ctcttattacccaaactaaaatacaat

SEQ ID NO: 2085 - DNA, 25 bp, Artificial Sequence
  Description of Artificial Sequence: Synthetic oligonucleotide
cttattacccaaactaaaatacaat

SEQ ID NO: 2086 - DNA, 24 bp, Artificial Sequence
  Description of Artificial Sequence: Synthetic oligonucleotide
ttattacccaaactaaaatacaat

SEQ ID NO: 2087 - DNA, 24 bp, Artificial Sequence
  Description of Artificial Sequence: Synthetic oligonucleotide
atacaataacacaatctcaactca

SEQ ID NO: 2088 - DNA, 25 bp, Artificial Sequence
  Description of Artificial Sequence: Synthetic oligonucleotide
ctcttattacccaaactaaaataca

SEQ ID NO: 2089 - DNA, 25 bp, Artificial Sequence
  Description of Artificial Sequence: Synthetic oligonucleotide
aaaatacaataacacaatctcaact

SEQ ID NO: 2090 - DNA, 24 bp, Artificial Sequence
  Description of Artificial Sequence: Synthetic oligonucleotide
tcttattacccaaactaaaataca

SEQ ID NO: 2091 - DNA, 26 bp, Artificial Sequence
  Description of Artificial Sequence: Synthetic oligonucleotide
tcactcttattacccaaactaaaata

SEQ ID NO: 2092 - DNA, 25 bp, Artificial Sequence
  Description of Artificial Sequence: Synthetic oligonucleotide
cactcttattacccaaactaaaata

SEQ ID NO: 2093 - DNA, 26 bp, Artificial Sequence
  Description of Artificial Sequence: Synthetic oligonucleotide
actcttattacccaaactaaaataca

SEQ ID NO: 2094 - DNA, 25 bp, Artificial Sequence
  Description of Artificial Sequence: Synthetic oligonucleotide
tacaataacacaatctcaactcacc

SEQ ID NO: 2095 - DNA, 25 bp, Artificial Sequence
  Description of Artificial Sequence: Synthetic oligonucleotide
aaatacaataacacaatctcaactc

SEQ ID NO: 2096 - DNA, 25 bp, Artificial Sequence
  Description of Artificial Sequence: Synthetic oligonucleotide
atacaataacacaatctcaactcac

SEQ ID NO: 2097 - DNA, 26 bp, Artificial Sequence
  Description of Artificial Sequence: Synthetic oligonucleotide
atacaataacacaatctcaactcacc

SEQ ID NO: 2098 - DNA, 24 bp, Artificial Sequence
  Description of Artificial Sequence: Synthetic oligonucleotide
tcactcttattacccaaactaaaa

SEQ ID NO: 2099 - DNA, 27 bp, Artificial Sequence
  Description of Artificial Sequence: Synthetic oligonucleotide
ctaaaatacaataacacaatctcaact

SEQ ID NO: 2100 - DNA, 23 bp, Artificial Sequence
  Description of Artificial Sequence: Synthetic oligonucleotide
cactcttattacccaaactaaaa

SEQ ID NO: 2101 - DNA, 25 bp, Artificial Sequence
  Description of Artificial Sequence: Synthetic oligonucleotide
ttcactcttattacccaaactaaaa

SEQ ID NO: 2102 - DNA, 26 bp, Artificial Sequence
  Description of Artificial Sequence: Synthetic oligonucleotide
tttcactcttattacccaaactaaaa

SEQ ID NO: 2103 - DNA, 23 bp, Artificial Sequence
  Description of Artificial Sequence: Synthetic oligonucleotide
actcttattacccaaactaaaat

SEQ ID NO: 2104 - DNA, 27 bp, Artificial Sequence
  Description of Artificial Sequence: Synthetic oligonucleotide
atttcactcttattacccaaactaaaa

SEQ ID NO: 2105 - DNA, 28 bp, Artificial Sequence
  Description of Artificial Sequence: Synthetic oligonucleotide
aatttcactcttattacccaaactaaaa

SEQ ID NO: 2106 - DNA, 24 bp, Artificial Sequence
  Description of Artificial Sequence: Synthetic oligonucleotide
aatttcactcttattacccaaact

SEQ ID NO: 2107 - DNA, 33 bp, Artificial Sequence
  Description of Artificial Sequence: Synthetic oligonucleotide
ccaaactaaaatacaataacacaatctcaactc

SEQ ID NO: 2108 - DNA, 22 bp, Artificial Sequence
  Description of Artificial Sequence: Synthetic oligonucleotide
tttcactcttattacccaaact

SEQ ID NO: 2109 - DNA, 23 bp, Artificial Sequence
  Description of Artificial Sequence: Synthetic oligonucleotide
atttcactcttattacccaaact

SEQ ID NO: 2110 - DNA, 23 bp, Artificial Sequence
  Description of Artificial Sequence: Synthetic oligonucleotide
ttcactcttattacccaaactaa

SEQ ID NO: 2111 - DNA, 25 bp, Artificial Sequence
  Description of Artificial Sequence: Synthetic oligonucleotide
ggatagagattggagtttaattttg

SEQ ID NO: 2112 - DNA, 17 bp, Artificial Sequence
  Description of Artificial Sequence: Synthetic oligonucleotide
atcccttccacccaacc

SEQ ID NO: 2113 - DNA, 27 bp, Artificial Sequence
  Description of Artificial Sequence: Synthetic oligonucleotide
gtgagtggtttagagcgttcgtttagt

SEQ ID NO: 2114 - DNA, 30 bp, Artificial Sequence
  Description of Artificial Sequence: Synthetic oligonucleotide
agtttaattttggattgtatagatgtttgt

SEQ ID NO: 2115 - DNA, 17 bp, Artificial Sequence
  Description of Artificial Sequence: Synthetic oligonucleotide
catcccttccacccaac

SEQ ID NO: 2116 - DNA, 16 bp, Artificial Sequence
  Description of Artificial Sequence: Synthetic oligonucleotide
tcccttccacccaacc

SEQ ID NO: 2117 - DNA, 16 bp, Artificial Sequence
  Description of Artificial Sequence: Synthetic oligonucleotide
cccttccacccaacct

SEQ ID NO: 2118 - DNA, 23 bp, Artificial Sequence
  Description of Artificial Sequence: Synthetic oligonucleotide
agagattggagtttaattttgga

SEQ ID NO: 2119 - DNA, 29 bp, Artificial Sequence
  Description of Artificial Sequence: Synthetic oligonucleotide
aattttggattgtatagatgtttgttgat

SEQ ID NO: 2120 - DNA, 22 bp, Artificial Sequence
  Description of Artificial Sequence: Synthetic oligonucleotide
gagattggagtttaattttgga

SEQ ID NO: 2121 - DNA, 24 bp, Artificial Sequence
  Description of Artificial Sequence: Synthetic oligonucleotide
tagagattggagtttaattttgga

SEQ ID NO: 2122 - DNA, 25 bp, Artificial Sequence
  Description of Artificial Sequence: Synthetic oligonucleotide
atagagattggagtttaattttgga

SEQ ID NO: 2123 - DNA, 25 bp, Artificial Sequence
  Description of Artificial Sequence: Synthetic oligonucleotide
gatagagattggagtttaattttgg

SEQ ID NO: 2124 - DNA, 30 bp, Artificial Sequence; identical to SEQ ID NO: 1192
  Description of Artificial Sequence: Synthetic oligonucleotide

SEQ ID NO: 2125 - DNA, 30 bp, Artificial Sequence; identical to SEQ ID NO: 1193
  Description of Artificial Sequence: Synthetic oligonucleotide

SEQ ID NO: 2126 - DNA, 23 bp, Artificial Sequence
  Description of Artificial Sequence: Synthetic oligonucleotide
gagattggagtttaattttggat

SEQ ID NO: 2127 - DNA, 30 bp, Artificial Sequence; identical to SEQ ID NO: 1194
  Description of Artificial Sequence: Synthetic oligonucleotide

SEQ ID NO: 2128 - DNA, 24 bp, Artificial Sequence
  Description of Artificial Sequence: Synthetic oligonucleotide
agagattggagtttaattttggat

SEQ ID NO: 2129 - DNA, 25 bp, Artificial Sequence
  Description of Artificial Sequence: Synthetic oligonucleotide
tagagattggagtttaattttggat

SEQ ID NO: 2130 - DNA, 26 bp, Artificial Sequence
  Description of Artificial Sequence: Synthetic oligonucleotide
atagagattggagtttaattttggat

SEQ ID NO: 2131 - DNA, 27 bp, Artificial Sequence
  Description of Artificial Sequence: Synthetic oligonucleotide
gatagagattggagtttaattttggat

SEQ ID NO: 2132 - DNA, 30 bp, Artificial Sequence; identical to SEQ ID NO: 1195
  Description of Artificial Sequence: Synthetic oligonucleotide

SEQ ID NO: 2133 - DNA, 30 bp, Artificial Sequence; identical to SEQ ID NO: 1196
  Description of Artificial Sequence: Synthetic oligonucleotide

SEQ ID NO: 2134 - DNA, 26 bp, Artificial Sequence
  Description of Artificial Sequence: Synthetic oligonucleotide
gatagagattggagtttaattttgga

SEQ ID NO: 2135 - DNA, 30 bp, Artificial Sequence; identical to SEQ ID NO: 1197
  Description of Artificial Sequence: Synthetic oligonucleotide

SEQ ID NO: 2136 - DNA, 26 bp, Artificial Sequence
  Description of Artificial Sequence: Synthetic oligonucleotide
ggatagagattggagtttaattttgg

SEQ ID NO: 2137 - DNA, 30 bp, Artificial Sequence; identical to SEQ ID NO: 1198
  Description of Artificial Sequence: Synthetic oligonucleotide

SEQ ID NO: 2138 - DNA, 31 bp, Artificial Sequence
  Description of Artificial Sequence: Synthetic oligonucleotide
aattttggattgtatagatgtttgttgataa

SEQ ID NO: 2139 - DNA, 33 bp, Artificial Sequence
  Description of Artificial Sequence: Synthetic oligonucleotide
tttaattttggattgtatagatgtttgttgata

SEQ ID NO: 2140 - DNA, 33 bp, Artificial Sequence
  Description of Artificial Sequence: Synthetic oligonucleotide
ttggattgtatagatgtttgttgataatttgtg

SEQ ID NO: 2141 - DNA, 33 bp, Artificial Sequence
  Description of Artificial Sequence: Synthetic oligonucleotide
ttaattttggattgtatagatgtttgttgataa

SEQ ID NO: 2142 - DNA, 33 bp, Artificial Sequence
  Description of Artificial Sequence: Synthetic oligonucleotide
aattttggattgtatagatgtttgttgataatt

SEQ ID NO: 2143 - DNA, 33 bp, Artificial Sequence
  Description of Artificial Sequence: Synthetic oligonucleotide
taattttggattgtatagatgtttgttgataat

SEQ ID NO: 2144 - DNA, 33 bp, Artificial Sequence
  Description of Artificial Sequence: Synthetic oligonucleotide
agtttaattttggattgtatagatgtttgttga

SEQ ID NO: 2145 - DNA, 24 bp, Artificial Sequence
  Description of Artificial Sequence: Synthetic oligonucleotide
atagagattggagtttaattttgg

SEQ ID NO: 2146 - DNA, 33 bp, Artificial Sequence
  Description of Artificial Sequence: Synthetic oligonucleotide
gtttaattttggattgtatagatgtttgttgat

SEQ ID NO: 2147 - DNA, 33 bp, Artificial Sequence
  Description of Artificial Sequence: Synthetic oligonucleotide
ttttggattgtatagatgtttgttgataatttg

SEQ ID NO: 2148 - DNA, 33 bp, Artificial Sequence
  Description of Artificial Sequence: Synthetic oligonucleotide
tttggattgtatagatgtttgttgataatttgt

SEQ ID NO: 2149 - DNA, 33 bp, Artificial Sequence
  Description of Artificial Sequence: Synthetic oligonucleotide
attttggattgtatagatgtttgttgataattt

SEQ ID NO: 2150 - DNA, 34 bp, Artificial Sequence
  Description of Artificial Sequence: Synthetic oligonucleotide
gtttaattttggattgtatagatgtttgttgata

SEQ ID NO: 2151 - DNA, 34 bp, Artificial Sequence
  Description of Artificial Sequence: Synthetic oligonucleotide
tttaattttggattgtatagatgtttgttgataa

SEQ ID NO: 2152 - DNA, 34 bp, Artificial Sequence
  Description of Artificial Sequence: Synthetic oligonucleotide
taattttggattgtatagatgtttgttgataatt

SEQ ID NO: 2153 - DNA, 34 bp, Artificial Sequence
  Description of Artificial Sequence: Synthetic oligonucleotide
attttggattgtatagatgtttgttgataatttg

SEQ ID NO: 2154 - DNA, 34 bp, Artificial Sequence
  Description of Artificial Sequence: Synthetic oligonucleotide
aattttggattgtatagatgtttgttgataattt

SEQ ID NO: 2155 - DNA, 34 bp, Artificial Sequence
  Description of Artificial Sequence: Synthetic oligonucleotide
ttaattttggattgtatagatgtttgttgataat

SEQ ID NO: 2156 - DNA, 34 bp, Artificial Sequence
  Description of Artificial Sequence: Synthetic oligonucleotide
agtttaattttggattgtatagatgtttgttgat

SEQ ID NO: 2157 - DNA, 35 bp, Artificial Sequence
  Description of Artificial Sequence: Synthetic oligonucleotide
agtttaattttggattgtatagatgtttgttgata

SEQ ID NO: 2158 - DNA, 35 bp, Artificial Sequence
  Description of Artificial Sequence: Synthetic oligonucleotide
ttaattttggattgtatagatgtttgttgataatt

SEQ ID NO: 2159 - DNA, 35 bp, Artificial Sequence
  Description of Artificial Sequence: Synthetic oligonucleotide
tttaattttggattgtatagatgtttgttgataat

SEQ ID NO: 2160 - DNA, 35 bp, Artificial Sequence
  Description of Artificial Sequence: Synthetic oligonucleotide
gtttaattttggattgtatagatgtttgttgataa

SEQ ID NO: 2161 - DNA, 26 bp, Artificial Sequence
  Description of Artificial Sequence: Synthetic oligonucleotide
ttttctttaccttcttaaatcaacac

SEQ ID NO: 2162 - DNA, 22 bp, Artificial Sequence
  Description of Artificial Sequence: Synthetic oligonucleotide
gttggggaatgtgataggtagt

SEQ ID NO: 2163 - DNA, 27 bp, Artificial Sequence
  Description of Artificial Sequence: Synthetic oligonucleotide
atcaacactacgaaacgattaccgact

SEQ ID NO: 2164 - DNA, 26 bp, Artificial Sequence
  Description of Artificial Sequence: Synthetic oligonucleotide
tcaacactacaaaacaattaccaact

SEQ ID NO: 2165 - DNA, 22 bp, Artificial Sequence
  Description of Artificial Sequence: Synthetic oligonucleotide
ggttggggaatgtgataggtag

SEQ ID NO: 2166 - DNA, 23 bp, Artificial Sequence
  Description of Artificial Sequence: Synthetic oligonucleotide
ttggggaatgtgataggtagtag

SEQ ID NO: 2167 - DNA, 22 bp, Artificial Sequence
  Description of Artificial Sequence: Synthetic oligonucleotide
tggggaatgtgataggtagtag

SEQ ID NO: 2168 - DNA, 21 bp, Artificial Sequence
  Description of Artificial Sequence: Synthetic oligonucleotide
tagggttggggaatgtgatag

SEQ ID NO: 2169 - DNA, 20 bp, Artificial Sequence
  Description of Artificial Sequence: Synthetic oligonucleotide
agggttggggaatgtgatag

SEQ ID NO: 2170 - DNA, 19 bp, Artificial Sequence
  Description of Artificial Sequence: Synthetic oligonucleotide
gggttggggaatgtgatag

SEQ ID NO: 2171 - DNA, 24 bp, Artificial Sequence
  Description of Artificial Sequence: Synthetic oligonucleotide
gggaatgtgataggtagtaggttt

SEQ ID NO: 2172 - DNA, 25 bp, Artificial Sequence
  Description of Artificial Sequence: Synthetic oligonucleotide
ggggaatgtgataggtagtaggttt

SEQ ID NO: 2173 - DNA, 26 bp, Artificial Sequence
  Description of Artificial Sequence: Synthetic oligonucleotide
ggaatgtgataggtagtaggtttatt

SEQ ID NO: 2174 - DNA, 25 bp, Artificial Sequence
  Description of Artificial Sequence: Synthetic oligonucleotide
tttctttaccttcttaaatcaacac

SEQ ID NO: 2175 - DNA, 27 bp, Artificial Sequence
  Description of Artificial Sequence: Synthetic oligonucleotide
attttctttaccttcttaaatcaacac

SEQ ID NO: 2176 - DNA, 28 bp, Artificial Sequence
  Description of Artificial Sequence: Synthetic oligonucleotide
aattttctttaccttcttaaatcaacac

SEQ ID NO: 2177 - DNA, 25 bp, Artificial Sequence
  Description of Artificial Sequence: Synthetic oligonucleotide
ttctttaccttcttaaatcaacact

SEQ ID NO: 2178 - DNA, 29 bp, Artificial Sequence
  Description of Artificial Sequence: Synthetic oligonucleotide
taattttctttaccttcttaaatcaacac

SEQ ID NO: 2179 - DNA, 30 bp, Artificial Sequence; identical to SEQ ID NO: 1246
  Description of Artificial Sequence: Synthetic oligonucleotide

SEQ ID NO: 2180 - DNA, 27 bp, Artificial Sequence
  Description of Artificial Sequence: Synthetic oligonucleotide
atcaacactacaaaacaattaccaact

SEQ ID NO: 2181 - DNA, 28 bp, Artificial Sequence
  Description of Artificial Sequence: Synthetic oligonucleotide
ctaattttctttaccttcttaaatcaac

SEQ ID NO: 2182 - DNA, 26 bp, Artificial Sequence
  Description of Artificial Sequence: Synthetic oligonucleotide
aattttctttaccttcttaaatcaac

SEQ ID NO: 2183 - DNA, 32 bp, Artificial Sequence; identical to SEQ ID NO: 1256
  Description of Artificial Sequence: Synthetic oligonucleotide

SEQ ID NO: 2184 - DNA, 27 bp, Artificial Sequence
  Description of Artificial Sequence: Synthetic oligonucleotide
cctaattttctttaccttcttaaatca

SEQ ID NO: 2185 - DNA, 28 bp, Artificial Sequence
  Description of Artificial Sequence: Synthetic oligonucleotide
acctaattttctttaccttcttaaatca

SEQ ID NO: 2186 - DNA, 27 bp, Artificial Sequence
  Description of Artificial Sequence: Synthetic oligonucleotide
taattttctttaccttcttaaatcaac

SEQ ID NO: 2187 - DNA, 33 bp, Artificial Sequence
  Description of Artificial Sequence: Synthetic oligonucleotide
tcttaaatcaacactacaaaacaattaccaact

SEQ ID NO: 2188 - DNA, 33 bp, Artificial Sequence; identical to SEQ ID NO: 1265
  Description of Artificial Sequence: Synthetic oligonucleotide

SEQ ID NO: 2189 - DNA, 33 bp, Artificial Sequence; identical to SEQ ID NO: 1268
  Description of Artificial Sequence: Synthetic oligonucleotide

SEQ ID NO: 2190 - DNA, 33 bp, Artificial Sequence; identical to SEQ ID NO: 1269
  Description of Artificial Sequence: Synthetic oligonucleotide

SEQ ID NO: 2191 - DNA, 34 bp, Artificial Sequence
  Description of Artificial Sequence: Synthetic oligonucleotide
ttcttaaatcaacactacaaaacaattaccaact

SEQ ID NO: 2192 - DNA, 34 bp, Artificial Sequence
  Description of Artificial Sequence: Synthetic oligonucleotide
cttcttaaatcaacactacaaaacaattaccaac

SEQ ID NO: 2193 - DNA, 34 bp, Artificial Sequence
  Description of Artificial Sequence: Synthetic oligonucleotide
cttaaatcaacactacaaaacaattaccaactaa

SEQ ID NO: 2194 - DNA, 34 bp, Artificial Sequence
  Description of Artificial Sequence: Synthetic oligonucleotide
tcttaaatcaacactacaaaacaattaccaacta

SEQ ID NO: 2195 - DNA, 35 bp, Artificial Sequence
  Description of Artificial Sequence: Synthetic oligonucleotide
tcttaaatcaacactacaaaacaattaccaactaa

SEQ ID NO: 2196 - DNA, 35 bp, Artificial Sequence
  Description of Artificial Sequence: Synthetic oligonucleotide
ttcttaaatcaacactacaaaacaattaccaacta

SEQ ID NO: 2197 - DNA, 36 bp, Artificial Sequence
  Description of Artificial Sequence: Synthetic oligonucleotide
tcttaaatcaacactacaaaacaattaccaactaaa

SEQ ID NO: 2198 - DNA, 36 bp, Artificial Sequence
  Description of Artificial Sequence: Synthetic oligonucleotide
ttcttaaatcaacactacaaaacaattaccaactaa

SEQ ID NO: 2199 - DNA, 19 bp, Artificial Sequence
  Description of Artificial Sequence: Synthetic oligonucleotide
gtagggggatgtaggttgg

SEQ ID NO: 2200 - DNA, 22 bp, Artificial Sequence
  Description of Artificial Sequence: Synthetic oligonucleotide
cctctcaccctctttcctataa

SEQ ID NO: 2201 - DNA, 24 bp, Artificial Sequence
  Description of Artificial Sequence: Synthetic oligonucleotide
ggcggagaggttagggacgttttt

SEQ ID NO: 2202 - DNA, 21 bp, Artificial Sequence
  Description of Artificial Sequence: Synthetic oligonucleotide
ggttgggaatgttgtggtgga

SEQ ID NO: 2203 - DNA, 17 bp, Artificial Sequence
  Description of Artificial Sequence: Synthetic oligonucleotide
agggggatgtaggttgg

SEQ ID NO: 2204 - DNA, 22 bp, Artificial Sequence
  Description of Artificial Sequence: Synthetic oligonucleotide
ggttgggaatgttgtggtggag

SEQ ID NO: 2205 - DNA, 23 bp, Artificial Sequence
  Description of Artificial Sequence: Synthetic oligonucleotide
ggttgggaatgttgtggtggaga

SEQ ID NO: 2206 - DNA, 23 bp, Artificial Sequence
  Description of Artificial Sequence: Synthetic oligonucleotide
aggttgggaatgttgtggtggag

SEQ ID NO: 2207 - DNA, 22 bp, Artificial Sequence
  Description of Artificial Sequence: Synthetic oligonucleotide
acaacacccacttaaaatccct

SEQ ID NO: 2208 - DNA, 22 bp, Artificial Sequence
  Description of Artificial Sequence: Synthetic oligonucleotide
gttatatggggatggggaagta

SEQ ID NO: 2209 - DNA, 30 bp, Artificial Sequence
  Description of Artificial Sequence: Synthetic oligonucleotide
aatccctaacgtatcttaaaaacacacgac

SEQ ID NO: 2210 - DNA, 33 bp, Artificial Sequence
  Description of Artificial Sequence: Synthetic oligonucleotide
aatccctaacatatcttaaaaacacacaacaaa

SEQ ID NO: 2211 - DNA, 22 bp, Artificial Sequence
  Description of Artificial Sequence: Synthetic oligonucleotide
ttatatggggatggggaagtag

SEQ ID NO: 2212 - DNA, 20 bp, Artificial Sequence
  Description of Artificial Sequence: Synthetic oligonucleotide
ttttgttatatggggatggg

SEQ ID NO: 2213 - DNA, 19 bp, Artificial Sequence
  Description of Artificial Sequence: Synthetic oligonucleotide
tttgttatatggggatggg

SEQ ID NO: 2214 - DNA, 17 bp, Artificial Sequence
  Description of Artificial Sequence: Synthetic oligonucleotide
tggggatggggaagtag

SEQ ID NO: 2215 - DNA, 21 bp, Artificial Sequence
  Description of Artificial Sequence: Synthetic oligonucleotide
caacacccacttaaaatccct

SEQ ID NO: 2216 - DNA, 22 bp, Artificial Sequence
  Description of Artificial Sequence: Synthetic oligonucleotide
aacacccacttaaaatccctaa

SEQ ID NO: 2217 - DNA, 21 bp, Artificial Sequence
  Description of Artificial Sequence: Synthetic oligonucleotide
acacccacttaaaatccctaa

SEQ ID NO: 2218 - DNA, 33 bp, Artificial Sequence
  Description of Artificial Sequence: Synthetic oligonucleotide
atccctaacatatcttaaaaacacacaacaaat

SEQ ID NO: 2219 - DNA, 33 bp, Artificial Sequence
  Description of Artificial Sequence: Synthetic oligonucleotide
tccctaacatatcttaaaaacacacaacaaata

SEQ ID NO: 2220 - DNA, 23 bp, Artificial Sequence
  Description of Artificial Sequence: Synthetic oligonucleotide
caacacccacttaaaatccctaa

SEQ ID NO: 2221 - DNA, 33 bp, Artificial Sequence; identical to SEQ ID NO: 1276
  Description of Artificial Sequence: Synthetic oligonucleotide

SEQ ID NO: 2222 - DNA, 34 bp, Artificial Sequence
  Description of Artificial Sequence: Synthetic oligonucleotide
tccctaacatatcttaaaaacacacaacaaataa

SEQ ID NO: 2223 - DNA, 34 bp, Artificial Sequence
  Description of Artificial Sequence: Synthetic oligonucleotide
aaatccctaacatatcttaaaaacacacaacaaa

SEQ ID NO: 2224 - DNA, 22 bp, Artificial Sequence
  Description of Artificial Sequence: Synthetic oligonucleotide
aaacaacacccacttaaaatcc

SEQ ID NO: 2225 - DNA, 23 bp, Artificial Sequence
  Description of Artificial Sequence: Synthetic oligonucleotide
caaacaacacccacttaaaatcc

SEQ ID NO: 2226 - DNA, 21 bp, Artificial Sequence
  Description of Artificial Sequence: Synthetic oligonucleotide
aacaacacccacttaaaatcc

SEQ ID NO: 2227 - DNA, 34 bp, Artificial Sequence
  Description of Artificial Sequence: Synthetic oligonucleotide
aatccctaacatatcttaaaaacacacaacaaat

SEQ ID NO: 2228 - DNA, 34 bp, Artificial Sequence
  Description of Artificial Sequence: Synthetic oligonucleotide
atccctaacatatcttaaaaacacacaacaaata

SEQ ID NO: 2229 - DNA, 24 bp, Artificial Sequence
  Description of Artificial Sequence: Synthetic oligonucleotide
accttcttaaacattcctatccaa

SEQ ID NO: 2230 - DNA, 22 bp, Artificial Sequence
  Description of Artificial Sequence: Synthetic oligonucleotide
ttttggggaaagaggtaatttt

SEQ ID NO: 2231 - DNA, 22 bp, Artificial Sequence
  Description of Artificial Sequence: Synthetic oligonucleotide
tcctatccaacccgcgtccgaa

SEQ ID NO: 2232 - DNA, 23 bp, Artificial Sequence
  Description of Artificial Sequence: Synthetic oligonucleotide
tcctatccaacccacatccaaaa

SEQ ID NO: 2233 - DNA, 21 bp, Artificial Sequence
  Description of Artificial Sequence: Synthetic oligonucleotide
tttggggaaagaggtaatttt

SEQ ID NO: 2234 - DNA, 21 bp, Artificial Sequence
  Description of Artificial Sequence: Synthetic oligonucleotide
gttaaggtgtagggagtgggg

SEQ ID NO: 2235 - DNA, 20 bp, Artificial Sequence
  Description of Artificial Sequence: Synthetic oligonucleotide
ttaaggtgtagggagtgggg

SEQ ID NO: 2236 - DNA, 19 bp, Artificial Sequence
  Description of Artificial Sequence: Synthetic oligonucleotide
taaggtgtagggagtgggg

SEQ ID NO: 2237 - DNA, 21 bp, Artificial Sequence
  Description of Artificial Sequence: Synthetic oligonucleotide
agttaaggtgtagggagtggg

SEQ ID NO: 2238 - DNA, 18 bp, Artificial Sequence
  Description of Artificial Sequence: Synthetic oligonucleotide
ggggatgtaggatggagg

SEQ ID NO: 2239 - DNA, 18 bp, Artificial Sequence
  Description of Artificial Sequence: Synthetic oligonucleotide
gggggatgtaggatggag

SEQ ID NO: 2240 - DNA, 18 bp, Artificial Sequence
  Description of Artificial Sequence: Synthetic oligonucleotide
aaggtgtagggagtgggg

SEQ ID NO: 2241 - DNA, 20 bp, Artificial Sequence
  Description of Artificial Sequence: Synthetic oligonucleotide
ttggggaaagaggtaatttt

SEQ ID NO: 2242 - DNA, 23 bp, Artificial Sequence
  Description of Artificial Sequence: Synthetic oligonucleotide
tttttggggaaagaggtaatttt

SEQ ID NO: 2243 - DNA, 22 bp, Artificial Sequence
  Description of Artificial Sequence: Synthetic oligonucleotide
gagttaaggtgtagggagtggg

SEQ ID NO: 2244 - DNA, 17 bp, Artificial Sequence
  Description of Artificial Sequence: Synthetic oligonucleotide
aggtgtagggagtgggg

SEQ ID NO: 2245 - DNA, 23 bp, Artificial Sequence
  Description of Artificial Sequence: Synthetic oligonucleotide
ttcctatccaacccacatccaaa

SEQ ID NO: 2246 - DNA, 24 bp, Artificial Sequence
  Description of Artificial Sequence: Synthetic oligonucleotide
attcctatccaacccacatccaaa

SEQ ID NO: 2247 - DNA, 25 bp, Artificial Sequence
  Description of Artificial Sequence: Synthetic oligonucleotide
accttcttaaacattcctatccaac

SEQ ID NO: 2248 - DNA, 24 bp, Artificial Sequence
  Description of Artificial Sequence: Synthetic oligonucleotide
tccaacccacatccaaaaaatact

SEQ ID NO: 2249 - DNA, 24 bp, Artificial Sequence
  Description of Artificial Sequence: Synthetic oligonucleotide
ttcctatccaacccacatccaaaa

SEQ ID NO: 2250 - DNA, 25 bp, Artificial Sequence
  Description of Artificial Sequence: Synthetic oligonucleotide
ttcctatccaacccacatccaaaaa

SEQ ID NO: 2251 - DNA, 25 bp, Artificial Sequence
  Description of Artificial Sequence: Synthetic oligonucleotide
tccaacccacatccaaaaaatactc

SEQ ID NO: 2252 - DNA, 25 bp, Artificial Sequence
  Description of Artificial Sequence: Synthetic oligonucleotide
attcctatccaacccacatccaaaa

SEQ ID NO: 2253 - DNA, 23 bp, Artificial Sequence
  Description of Artificial Sequence: Synthetic oligonucleotide
accttcttaaacattcctatcca

SEQ ID NO: 2254 - DNA, 26 bp, Artificial Sequence
  Description of Artificial Sequence: Synthetic oligonucleotide
cattcctatccaacccacatccaaaa

SEQ ID NO: 2255 - DNA, 26 bp, Artificial Sequence
  Description of Artificial Sequence: Synthetic oligonucleotide
tccaacccacatccaaaaaatactca

SEQ ID NO: 2256 - DNA, 26 bp, Artificial Sequence
  Description of Artificial Sequence: Synthetic oligonucleotide
attcctatccaacccacatccaaaaa

SEQ ID NO: 2257 - DNA, 22 bp, Artificial Sequence
  Description of Artificial Sequence: Synthetic oligonucleotide
cctattcatcctcaacctaacc

SEQ ID NO: 2258 - DNA, 21 bp, Artificial Sequence
  Description of Artificial Sequence: Synthetic oligonucleotide
ttggagaaggtgttgtattgg

SEQ ID NO: 2259 - DNA, 28 bp, Artificial Sequence
  Description of Artificial Sequence: Synthetic oligonucleotide
cttcctactacgacaataacccttcgaa

SEQ ID NO: 2260 - DNA, 23 bp, Artificial Sequence
  Description of Artificial Sequence: Synthetic oligonucleotide
acctaaccatcaccaacaaactc

SEQ ID NO: 2261 - DNA, 22 bp, Artificial Sequence
  Description of Artificial Sequence: Synthetic oligonucleotide
gttggagaaggtgttgtattgg

SEQ ID NO: 2262 - DNA, 22 bp, Artificial Sequence
  Description of Artificial Sequence: Synthetic oligonucleotide
ggttggagaaggtgttgtattg

SEQ ID NO: 2263 - DNA, 20 bp, Artificial Sequence
  Description of Artificial Sequence: Synthetic oligonucleotide
tggagaaggtgttgtattgg

SEQ ID NO: 2264 - DNA, 23 bp, Artificial Sequence
  Description of Artificial Sequence: Synthetic oligonucleotide
ctattcatcctcaacctaaccat

SEQ ID NO: 2265 - DNA, 22 bp, Artificial Sequence
  Description of Artificial Sequence: Synthetic oligonucleotide
tattcatcctcaacctaaccat

SEQ ID NO: 2266 - DNA, 21 bp, Artificial Sequence
  Description of Artificial Sequence: Synthetic oligonucleotide
attcatcctcaacctaaccat

SEQ ID NO: 2267 - DNA, 23 bp, Artificial Sequence
  Description of Artificial Sequence: Synthetic oligonucleotide
acctattcatcctcaacctaacc

SEQ ID NO: 2268 - DNA, 24 bp, Artificial Sequence
  Description of Artificial Sequence: Synthetic oligonucleotide
aaccatcaccaacaaactcttcac

SEQ ID NO: 2269 - DNA, 24 bp, Artificial Sequence
  Description of Artificial Sequence: Synthetic oligonucleotide
cctattcatcctcaacctaaccat

SEQ ID NO: 2270 - DNA, 24 bp, Artificial Sequence
  Description of Artificial Sequence: Synthetic oligonucleotide
taaccatcaccaacaaactcttca

SEQ ID NO: 2271 - DNA, 24 bp, Artificial Sequence
  Description of Artificial Sequence: Synthetic oligonucleotide
cctaaccatcaccaacaaactctt

SEQ ID NO: 2272 - DNA, 24 bp, Artificial Sequence
  Description of Artificial Sequence: Synthetic oligonucleotide
aacctaaccatcaccaacaaactc

SEQ ID NO: 2273 - DNA, 24 bp, Artificial Sequence
  Description of Artificial Sequence: Synthetic oligonucleotide
acctaaccatcaccaacaaactct

SEQ ID NO: 2274 - DNA, 24 bp, Artificial Sequence
  Description of Artificial Sequence: Synthetic oligonucleotide
ctcaacctaaccatcaccaacaaa

SEQ ID NO: 2275 - DNA, 25 bp, Artificial Sequence
  Description of Artificial Sequence: Synthetic oligonucleotide
ctcaacctaaccatcaccaacaaac

SEQ ID NO: 2276 - DNA, 25 bp, Artificial Sequence
  Description of Artificial Sequence: Synthetic oligonucleotide
tcaacctaaccatcaccaacaaact

SEQ ID NO: 2277 - DNA, 25 bp, Artificial Sequence
  Description of Artificial Sequence: Synthetic oligonucleotide
acctaaccatcaccaacaaactctt

SEQ ID NO: 2278 - DNA, 25 bp, Artificial Sequence
  Description of Artificial Sequence: Synthetic oligonucleotide
aacctaaccatcaccaacaaactct

SEQ ID NO: 2279 - DNA, 25 bp, Artificial Sequence
  Description of Artificial Sequence: Synthetic oligonucleotide
cctaaccatcaccaacaaactcttc

SEQ ID NO: 2280 - DNA, 25 bp, Artificial Sequence
  Description of Artificial Sequence: Synthetic oligonucleotide
taaccatcaccaacaaactcttcac

SEQ ID NO: 2281 - DNA, 25 bp, Artificial Sequence
  Description of Artificial Sequence: Synthetic oligonucleotide
ctaaccatcaccaacaaactcttca

SEQ ID NO: 2282 - DNA, 25 bp, Artificial Sequence
  Description of Artificial Sequence: Synthetic oligonucleotide
caacctaaccatcaccaacaaactc

SEQ ID NO: 2283 - DNA, 26 bp, Artificial Sequence
  Description of Artificial Sequence: Synthetic oligonucleotide
acctaaccatcaccaacaaactcttc

SEQ ID NO: 2284 - DNA, 26 bp, Artificial Sequence
  Description of Artificial Sequence: Synthetic oligonucleotide
ctaaccatcaccaacaaactcttcac

SEQ ID NO: 2285 - DNA, 26 bp, Artificial Sequence
  Description of Artificial Sequence: Synthetic oligonucleotide
cctaaccatcaccaacaaactcttca

SEQ ID NO: 2286 - DNA, 26 bp, Artificial Sequence
  Description of Artificial Sequence: Synthetic oligonucleotide
aacctaaccatcaccaacaaactctt

SEQ ID NO: 2287 - DNA, 26 bp, Artificial Sequence
  Description of Artificial Sequence: Synthetic oligonucleotide
ctcaacctaaccatcaccaacaaact

SEQ ID NO: 2288 - DNA, 26 bp, Artificial Sequence
  Description of Artificial Sequence: Synthetic oligonucleotide
tcaacctaaccatcaccaacaaactc

SEQ ID NO: 2289 - DNA, 26 bp, Artificial Sequence
  Description of Artificial Sequence: Synthetic oligonucleotide
caacctaaccatcaccaacaaactct

SEQ ID NO: 2290 - DNA, 27 bp, Artificial Sequence
  Description of Artificial Sequence: Synthetic oligonucleotide
cctaaccatcaccaacaaactcttcac

SEQ ID NO: 2291 - DNA, 27 bp, Artificial Sequence
  Description of Artificial Sequence: Synthetic oligonucleotide
acctaaccatcaccaacaaactcttca

SEQ ID NO: 2292 - DNA, 27 bp, Artificial Sequence
  Description of Artificial Sequence: Synthetic oligonucleotide
caacctaaccatcaccaacaaactctt

SEQ ID NO: 2293 - DNA, 27 bp, Artificial Sequence
  Description of Artificial Sequence: Synthetic oligonucleotide
tcaacctaaccatcaccaacaaactct

SEQ ID NO: 2294 - DNA, 27 bp, Artificial Sequence
  Description of Artificial Sequence: Synthetic oligonucleotide
aacctaaccatcaccaacaaactcttc

SEQ ID NO: 2295 - DNA, 28 bp, Artificial Sequence
  Description of Artificial Sequence: Synthetic oligonucleotide
tcaacctaaccatcaccaacaaactctt

SEQ ID NO: 2296 - DNA, 28 bp, Artificial Sequence
  Description of Artificial Sequence: Synthetic oligonucleotide
caacctaaccatcaccaacaaactcttc

SEQ ID NO: 2297 - DNA, 28 bp, Artificial Sequence
  Description of Artificial Sequence: Synthetic oligonucleotide
aacctaaccatcaccaacaaactcttca

SEQ ID NO: 2298 - DNA, 27 bp, Artificial Sequence
  Description of Artificial Sequence: Synthetic oligonucleotide
aaccatcaccaacaaactcttcacact

SEQ ID NO: 2299 - DNA, 28 bp, Artificial Sequence
  Description of Artificial Sequence: Synthetic oligonucleotide
taaccatcaccaacaaactcttcacact

SEQ ID NO: 2300 - DNA, 28 bp, Artificial Sequence
  Description of Artificial Sequence: Synthetic oligonucleotide
aaccatcaccaacaaactcttcacacta

SEQ ID NO: 2301 - DNA, 29 bp, Artificial Sequence
  Description of Artificial Sequence: Synthetic oligonucleotide
taaccatcaccaacaaactcttcacacta

SEQ ID NO: 2302 - DNA, 22 bp, Artificial Sequence
  Description of Artificial Sequence: Synthetic oligonucleotide
cctttctctcttcccactatcc

SEQ ID NO: 2303 - DNA, 22 bp, Artificial Sequence
  Description of Artificial Sequence: Synthetic oligonucleotide
agttttgggagttggaggtaat

SEQ ID NO: 2304 - DNA, 30 bp, Artificial Sequence
  Description of Artificial Sequence: Synthetic oligonucleotide
ccctactaaacaaaatcccgaaacgaaatt

SEQ ID NO: 2305 - DNA, 24 bp, Artificial Sequence
  Description of Artificial Sequence: Synthetic oligonucleotide
ctatcccatccaccaaacctcaac

SEQ ID NO: 2306 - DNA, 22 bp, Artificial Sequence
  Description of Artificial Sequence: Synthetic oligonucleotide
taagttttgggagttggaggta

SEQ ID NO: 2307 - DNA, 21 bp, Artificial Sequence
  Description of Artificial Sequence: Synthetic oligonucleotide
gttttgggagttggaggtaat

SEQ ID NO: 2308 - DNA, 22 bp, Artificial Sequence
  Description of Artificial Sequence: Synthetic oligonucleotide
gtaagttttgggagttggaggt

SEQ ID NO: 2309 - DNA, 23 bp, Artificial Sequence
  Description of Artificial Sequence: Synthetic oligonucleotide
aagttttgggagttggaggtaat

SEQ ID NO: 2310 - DNA, 20 bp, Artificial Sequence
  Description of Artificial Sequence: Synthetic oligonucleotide
ttttgggagttggaggtaat

SEQ ID NO: 2311 - DNA, 23 bp, Artificial Sequence
  Description of Artificial Sequence: Synthetic oligonucleotide
agtaagttttgggagttggaggt

SEQ ID NO: 2312 - DNA, 22 bp, Artificial Sequence
  Description of Artificial Sequence: Synthetic oligonucleotide
tagtaagttttgggagttggag

SEQ ID NO: 2313 - DNA, 23 bp, Artificial Sequence
  Description of Artificial Sequence: Synthetic oligonucleotide
gtagtaagttttgggagttggag

SEQ ID NO: 2314 - DNA, 23 bp, Artificial Sequence
  Description of Artificial Sequence: Synthetic oligonucleotide
acctttctctcttcccactatcc

SEQ ID NO: 2315 - DNA, 25 bp, Artificial Sequence
  Description of Artificial Sequence: Synthetic oligonucleotide
actatcccatccaccaaacctcaac

SEQ ID NO: 2316 - DNA, 23 bp, Artificial Sequence
  Description of Artificial Sequence: Synthetic oligonucleotide
cacctttctctcttcccactatc

SEQ ID NO: 2317 - DNA, 24 bp, Artificial Sequence
  Description of Artificial Sequence: Synthetic oligonucleotide
acacctttctctcttcccactatc

SEQ ID NO: 2318 - DNA, 26 bp, Artificial Sequence
  Description of Artificial Sequence: Synthetic oligonucleotide
cactatcccatccaccaaacctcaac

SEQ ID NO: 2319 - DNA, 22 bp, Artificial Sequence
  Description of Artificial Sequence: Synthetic oligonucleotide
cacctttctctcttcccactat

SEQ ID NO: 2320 - DNA, 23 bp, Artificial Sequence
  Description of Artificial Sequence: Synthetic oligonucleotide
acacctttctctcttcccactat

SEQ ID NO: 2321 - DNA, 24 bp, Artificial Sequence
  Description of Artificial Sequence: Synthetic oligonucleotide
aacacctttctctcttcccactat

SEQ ID NO: 2322 - DNA, 25 bp, Artificial Sequence
  Description of Artificial Sequence: Synthetic oligonucleotide
taacacctttctctcttcccactat

SEQ ID NO: 2323 - DNA, 26 bp, Artificial Sequence
  Description of Artificial Sequence: Synthetic oligonucleotide
ttaacacctttctctcttcccactat

SEQ ID NO: 2324 - DNA, 18 bp, Artificial Sequence
  Description of Artificial Sequence: Synthetic oligonucleotide
ttttggggtgtttagggg

SEQ ID NO: 2325 - DNA, 28 bp, Artificial Sequence
  Description of Artificial Sequence: Synthetic oligonucleotide
ttaactctcaatcacctactaataacaa

SEQ ID NO: 2326 - DNA, 21 bp, Artificial Sequence
  Description of Artificial Sequence: Synthetic oligonucleotide
ggtcggtaagtcgcggttggg

SEQ ID NO: 2327 - DNA, 21 bp, Artificial Sequence
  Description of Artificial Sequence: Synthetic oligonucleotide
taggggagtgtgtgggttttg

SEQ ID NO: 2328 - DNA, 27 bp, Artificial Sequence
  Description of Artificial Sequence: Synthetic oligonucleotide
taactctcaatcacctactaataacaa

SEQ ID NO: 2329 - DNA, 30 bp, Artificial Sequence
  Description of Artificial Sequence: Synthetic oligonucleotide
aattaactctcaatcacctactaataacaa

SEQ ID NO: 2330 - DNA, 29 bp, Artificial Sequence
  Description of Artificial Sequence: Synthetic oligonucleotide
attaactctcaatcacctactaataacaa

SEQ ID NO: 2331 - DNA, 18 bp, Artificial Sequence
  Description of Artificial Sequence: Synthetic oligonucleotide
ttggggtgtttaggggag

SEQ ID NO: 2332 - DNA, 17 bp, Artificial Sequence
  Description of Artificial Sequence: Synthetic oligonucleotide
tggggtgtttaggggag

SEQ ID NO: 2333 - DNA, 21 bp, Artificial Sequence
  Description of Artificial Sequence: Synthetic oligonucleotide
tgtttaggggagtgtgtgggt

SEQ ID NO: 2334 - DNA, 21 bp, Artificial Sequence
  Description of Artificial Sequence: Synthetic oligonucleotide
gtttaggggagtgtgtgggtt

SEQ ID NO: 2335 - DNA, 22 bp, Artificial Sequence
  Description of Artificial Sequence: Synthetic oligonucleotide
ttaggggagtgtgtgggttttg

SEQ ID NO: 2336 - DNA, 24 bp, Artificial Sequence
  Description of Artificial Sequence: Synthetic oligonucleotide
ccctactattataccccaccataa

SEQ ID NO: 2337 - DNA, 26 bp, Artificial Sequence
  Description of Artificial Sequence: Synthetic oligonucleotide
aaatagggaggatattgtaagtttag

SEQ ID NO: 2338 - DNA, 21 bp, Artificial Sequence
  Description of Artificial Sequence: Synthetic oligonucleotide
tctcaacgccgcaactcccaa

SEQ ID NO: 2339 - DNA, 27 bp, Artificial Sequence
  Description of Artificial Sequence: Synthetic oligonucleotide
ccataattcacaccctttctcaacacc

SEQ ID NO: 2340 - DNA, 27 bp, Artificial Sequence
  Description of Artificial Sequence: Synthetic oligonucleotide
taaatagggaggatattgtaagtttag

SEQ ID NO: 2341 - DNA, 22 bp, Artificial Sequence
  Description of Artificial Sequence: Synthetic oligonucleotide
tggtattttatgtttttgggat

SEQ ID NO: 2342 - DNA, 24 bp, Artificial Sequence
  Description of Artificial Sequence: Synthetic oligonucleotide
aatggtattttatgtttttgggat

SEQ ID NO: 2343 - DNA, 23 bp, Artificial Sequence
  Description of Artificial Sequence: Synthetic oligonucleotide
atggtattttatgtttttgggat

SEQ ID NO: 2344 - DNA, 25 bp, Artificial Sequence
  Description of Artificial Sequence: Synthetic oligonucleotide
aaatggtattttatgtttttgggat

SEQ ID NO: 2345 - DNA, 26 bp, Artificial Sequence
  Description of Artificial Sequence: Synthetic oligonucleotide
gaaatggtattttatgtttttgggat

SEQ ID NO: 2346 - DNA, 28 bp, Artificial Sequence
  Description of Artificial Sequence: Synthetic oligonucleotide
cactcttatctcaaaacaacaaactaat

SEQ ID NO: 2347 - DNA, 22 bp, Artificial Sequence
  Description of Artificial Sequence: Synthetic oligonucleotide
tgtaaggagtatttgggtttgg

SEQ ID NO: 2348 - DNA, 28 bp, Artificial Sequence
  Description of Artificial Sequence: Synthetic oligonucleotide
accaaacattttacgaaaaaacccgacc

SEQ ID NO: 2349 - DNA, 29 bp, Artificial Sequence
  Description of Artificial Sequence: Synthetic oligonucleotide
actaatccataaaccaaaacttttcattt

SEQ ID NO: 2350 - DNA, 23 bp, Artificial Sequence
  Description of Artificial Sequence: Synthetic oligonucleotide
aaggattgtaaggagtatttggg

SEQ ID NO: 2351 - DNA, 24 bp, Artificial Sequence
  Description of Artificial Sequence: Synthetic oligonucleotide
acgaaaaaacccgacctcatcccc

SEQ ID NO: 2352 - DNA, 23 bp, Artificial Sequence
  Description of Artificial Sequence: Synthetic oligonucleotide
ggattgtaaggagtatttgggtt

SEQ ID NO: 2353 - DNA, 22 bp, Artificial Sequence
  Description of Artificial Sequence: Synthetic oligonucleotide
aggattgtaaggagtatttggg

SEQ ID NO: 2354 - DNA, 24 bp, Artificial Sequence
  Description of Artificial Sequence: Synthetic oligonucleotide
aaaaggattgtaaggagtatttgg

SEQ ID NO: 2355 - DNA, 24 bp, Artificial Sequence
  Description of Artificial Sequence: Synthetic oligonucleotide
aaaggattgtaaggagtatttggg

SEQ ID NO: 2356 - DNA, 25 bp, Artificial Sequence
  Description of Artificial Sequence: Synthetic oligonucleotide
aaaaaggattgtaaggagtatttgg

SEQ ID NO: 2357 - DNA, 23 bp, Artificial Sequence
  Description of Artificial Sequence: Synthetic oligonucleotide
gattgtaaggagtatttgggttt

SEQ ID NO: 2358 - DNA, 24 bp, Artificial Sequence
  Description of Artificial Sequence: Synthetic oligonucleotide
attgtaaggagtatttgggtttgg

SEQ ID NO: 2359 - DNA, 21 bp, Artificial Sequence
  Description of Artificial Sequence: Synthetic oligonucleotide
gtaaggagtatttgggtttgg

SEQ ID NO: 2360 - DNA, 26 bp, Artificial Sequence
  Description of Artificial Sequence: Synthetic oligonucleotide
taaaaaggattgtaaggagtatttgg

SEQ ID NO: 2361 - DNA, 27 bp, Artificial Sequence
  Description of Artificial Sequence: Synthetic oligonucleotide
aaggtaaaaaggattgtaaggagtatt

SEQ ID NO: 2362 - DNA, 25 bp, Artificial Sequence
  Description of Artificial Sequence: Synthetic oligonucleotide
ggtaaaaaggattgtaaggagtatt

SEQ ID NO: 2363 - DNA, 26 bp, Artificial Sequence
  Description of Artificial Sequence: Synthetic oligonucleotide
aggtaaaaaggattgtaaggagtatt

SEQ ID NO: 2364 - DNA, 27 bp, Artificial Sequence
  Description of Artificial Sequence: Synthetic oligonucleotide
gtaaaaaggattgtaaggagtatttgg

SEQ ID NO: 2365 - DNA, 18 bp, Artificial Sequence
  Description of Artificial Sequence: Synthetic oligonucleotide
gagtatttgggtttgggg

SEQ ID NO: 2366 - DNA, 27 bp, Artificial Sequence
  Description of Artificial Sequence: Synthetic oligonucleotide
actcttatctcaaaacaacaaactaat

SEQ ID NO: 2367 - DNA, 29 bp, Artificial Sequence
  Description of Artificial Sequence: Synthetic oligonucleotide
aactaatccataaaccaaaacttttcatt

SEQ ID NO: 2368 - DNA, 27 bp, Artificial Sequence
  Description of Artificial Sequence: Synthetic oligonucleotide
ccactcttatctcaaaacaacaaacta

SEQ ID NO: 2369 - DNA, 26 bp, Artificial Sequence
  Description of Artificial Sequence: Synthetic oligonucleotide
ccgtaaaccgaaacttttcgtttccc

SEQ ID NO: 2370 - DNA, 30 bp, Artificial Sequence
  Description of Artificial Sequence: Synthetic oligonucleotide
aaactaatccataaaccaaaacttttcatt

SEQ ID NO: 2371 - DNA, 29 bp, Artificial Sequence
  Description of Artificial Sequence: Synthetic oligonucleotide
taccactcttatctcaaaacaacaaacta

SEQ ID NO: 2372 - DNA, 30 bp, Artificial Sequence
  Description of Artificial Sequence: Synthetic oligonucleotide
actaatccataaaccaaaacttttcatttc

SEQ ID NO: 2373 - DNA, 30 bp, Artificial Sequence
  Description of Artificial Sequence: Synthetic oligonucleotide
aactaatccataaaccaaaacttttcattt

SEQ ID NO: 2374 - DNA, 31 bp, Artificial Sequence
  Description of Artificial Sequence: Synthetic oligonucleotide
caaactaatccataaaccaaaacttttcatt

SEQ ID NO: 2375 - DNA, 31 bp, Artificial Sequence
  Description of Artificial Sequence: Synthetic oligonucleotide
actaatccataaaccaaaacttttcatttcc

SEQ ID NO: 2376 - DNA, 31 bp, Artificial Sequence
  Description of Artificial Sequence: Synthetic oligonucleotide
aactaatccataaaccaaaacttttcatttc

SEQ ID NO: 2377 - DNA, 31 bp, Artificial Sequence
  Description of Artificial Sequence: Synthetic oligonucleotide
aaactaatccataaaccaaaacttttcattt

SEQ ID NO: 2378 - DNA, 32 bp, Artificial Sequence
  Description of Artificial Sequence: Synthetic oligonucleotide
aactaatccataaaccaaaacttttcatttcc

SEQ ID NO: 2379 - DNA, 32 bp, Artificial Sequence
  Description of Artificial Sequence: Synthetic oligonucleotide
caaactaatccataaaccaaaacttttcattt

SEQ ID NO: 2380 - DNA, 32 bp, Artificial Sequence
  Description of Artificial Sequence: Synthetic oligonucleotide
aaactaatccataaaccaaaacttttcatttc

SEQ ID NO: 2381 - DNA, 25 bp, Artificial Sequence
  Description of Artificial Sequence: Synthetic oligonucleotide
ccactcttatctcaaaacaacaaac

SEQ ID NO: 2382 - DNA, 32 bp, Artificial Sequence
  Description of Artificial Sequence: Synthetic oligonucleotide
acaaactaatccataaaccaaaacttttcatt

SEQ ID NO: 2383 - DNA, 26 bp, Artificial Sequence
  Description of Artificial Sequence: Synthetic oligonucleotide
accactcttatctcaaaacaacaaac

SEQ ID NO: 2384 - DNA, 27 bp, Artificial Sequence
  Description of Artificial Sequence: Synthetic oligonucleotide
taccactcttatctcaaaacaacaaac

SEQ ID NO: 2385 - DNA, 28 bp, Artificial Sequence
  Description of Artificial Sequence: Synthetic oligonucleotide
ctaccactcttatctcaaaacaacaaac

SEQ ID NO: 2386 - DNA, 32 bp, Artificial Sequence
  Description of Artificial Sequence: Synthetic oligonucleotide
actaatccataaaccaaaacttttcatttccc

SEQ ID NO: 2387 - DNA, 33 bp, Artificial Sequence
  Description of Artificial Sequence: Synthetic oligonucleotide
caaactaatccataaaccaaaacttttcatttc

SEQ ID NO: 2388 - DNA, 24 bp, Artificial Sequence
  Description of Artificial Sequence: Synthetic oligonucleotide
ccactcttatctcaaaacaacaaa

SEQ ID NO: 2389 - DNA, 33 bp, Artificial Sequence
  Description of Artificial Sequence: Synthetic oligonucleotide
aacaaactaatccataaaccaaaacttttcatt

SEQ ID NO: 2390 - DNA, 25 bp, Artificial Sequence
  Description of Artificial Sequence: Synthetic oligonucleotide
accactcttatctcaaaacaacaaa

SEQ ID NO: 2391 - DNA, 26 bp, Artificial Sequence
  Description of Artificial Sequence: Synthetic oligonucleotide
taccactcttatctcaaaacaacaaa

SEQ ID NO: 2392 - DNA, 27 bp, Artificial Sequence
  Description of Artificial Sequence: Synthetic oligonucleotide
ctaccactcttatctcaaaacaacaaa

SEQ ID NO: 2393 - DNA, 33 bp, Artificial Sequence
  Description of Artificial Sequence: Synthetic oligonucleotide
aactaatccataaaccaaaacttttcatttccc

SEQ ID NO: 2394 - DNA, 33 bp, Artificial Sequence
  Description of Artificial Sequence: Synthetic oligonucleotide
aaactaatccataaaccaaaacttttcatttcc

SEQ ID NO: 2395 - DNA, 33 bp, Artificial Sequence
  Description of Artificial Sequence: Synthetic oligonucleotide
acaaactaatccataaaccaaaacttttcattt

SEQ ID NO: 2396 - DNA, 34 bp, Artificial Sequence
  Description of Artificial Sequence: Synthetic oligonucleotide
aacaaactaatccataaaccaaaacttttcattt

SEQ ID NO: 2397 - DNA, 34 bp, Artificial Sequence
  Description of Artificial Sequence: Synthetic oligonucleotide
acaaactaatccataaaccaaaacttttcatttc

SEQ ID NO: 2398 - DNA, 34 bp, Artificial Sequence
  Description of Artificial Sequence: Synthetic oligonucleotide
caacaaactaatccataaaccaaaacttttcatt

SEQ ID NO: 2399 - DNA, 24 bp, Artificial Sequence
  Description of Artificial Sequence: Synthetic oligonucleotide
accactcttatctcaaaacaacaa

SEQ ID NO: 2400 - DNA, 25 bp, Artificial Sequence
  Description of Artificial Sequence: Synthetic oligonucleotide
taccactcttatctcaaaacaacaa

SEQ ID NO: 2401 - DNA, 26 bp, Artificial Sequence
  Description of Artificial Sequence: Synthetic oligonucleotide
ctaccactcttatctcaaaacaacaa

SEQ ID NO: 2402 - DNA, 34 bp, Artificial Sequence
  Description of Artificial Sequence: Synthetic oligonucleotide
caaactaatccataaaccaaaacttttcatttcc

SEQ ID NO: 2403 - DNA, 35 bp, Artificial Sequence
  Description of Artificial Sequence: Synthetic oligonucleotide
aacaaactaatccataaaccaaaacttttcatttc

SEQ ID NO: 2404 - DNA, 35 bp, Artificial Sequence
  Description of Artificial Sequence: Synthetic oligonucleotide
caacaaactaatccataaaccaaaacttttcattt

SEQ ID NO: 2405 - DNA, 24 bp, Artificial Sequence
  Description of Artificial Sequence: Synthetic oligonucleotide
ggtaaggtggagttgtgaatttag

SEQ ID NO: 2406 - DNA, 22 bp, Artificial Sequence
  Description of Artificial Sequence: Synthetic oligonucleotide
aaaaccaaatcattctacccaa

SEQ ID NO: 2407 - DNA, 25 bp, Artificial Sequence
  Description of Artificial Sequence: Synthetic oligonucleotide
gtgaatttagcgtttcggggagagt

SEQ ID NO: 2408 - DNA, 24 bp, Artificial Sequence
  Description of Artificial Sequence: Synthetic oligonucleotide
atttagtgttttggggagagttgg

SEQ ID NO: 2409 - DNA, 22 bp, Artificial Sequence
  Description of Artificial Sequence: Synthetic oligonucleotide
aaaccaaatcattctacccaac

SEQ ID NO: 2410 - DNA, 23 bp, Artificial Sequence
  Description of Artificial Sequence: Synthetic oligonucleotide
ccaaatcattctacccaactaca

SEQ ID NO: 2411 - DNA, 21 bp, Artificial Sequence
  Description of Artificial Sequence: Synthetic oligonucleotide
accccattttccaaataaaaa

SEQ ID NO: 2412 - DNA, 22 bp, Artificial Sequence
  Description of Artificial Sequence: Synthetic oligonucleotide
attctacccaactacaccccat

SEQ ID NO: 2413 - DNA, 22 bp, Artificial Sequence
  Description of Artificial Sequence: Synthetic oligonucleotide
aaccaaatcattctacccaact

SEQ ID NO: 2414 - DNA, 22 bp, Artificial Sequence
  Description of Artificial Sequence: Synthetic oligonucleotide
atcattctacccaactacaccc

SEQ ID NO: 2415 - DNA, 21 bp, Artificial Sequence
  Description of Artificial Sequence: Synthetic oligonucleotide
cattctacccaactacacccc

SEQ ID NO: 2416 - DNA, 21 bp, Artificial Sequence
  Description of Artificial Sequence: Synthetic oligonucleotide
ttctacccaactacaccccat

SEQ ID NO: 2417 - DNA, 23 bp, Artificial Sequence
  Description of Artificial Sequence: Synthetic oligonucleotide
aatcattctacccaactacaccc

SEQ ID NO: 2418 - DNA, 21 bp, Artificial Sequence
  Description of Artificial Sequence: Synthetic oligonucleotide
tctacccaactacaccccatc

SEQ ID NO: 2419 - DNA, 22 bp, Artificial Sequence
  Description of Artificial Sequence: Synthetic oligonucleotide
aaaccccattttccaaataaaa

SEQ ID NO: 2420 - DNA, 22 bp, Artificial Sequence
  Description of Artificial Sequence: Synthetic oligonucleotide
accaaatcattctacccaacta

SEQ ID NO: 2421 - DNA, 22 bp, Artificial Sequence
  Description of Artificial Sequence: Synthetic oligonucleotide
ccccattttccaaataaaaata

SEQ ID NO: 2422 - DNA, 21 bp, Artificial Sequence
  Description of Artificial Sequence: Synthetic oligonucleotide
tcattctacccaactacaccc

SEQ ID NO: 2423 - DNA, 22 bp, Artificial Sequence
  Description of Artificial Sequence: Synthetic oligonucleotide
aactacaatcttcccaaaaacc

SEQ ID NO: 2424 - DNA, 25 bp, Artificial Sequence
  Description of Artificial Sequence: Synthetic oligonucleotide
aaattacccaaaatcataaaacaaa

SEQ ID NO: 2425 - DNA, 21 bp, Artificial Sequence
  Description of Artificial Sequence: Synthetic oligonucleotide
aaccccattttccaaataaaa

SEQ ID NO: 2426 - DNA, 21 bp, Artificial Sequence
  Description of Artificial Sequence: Synthetic oligonucleotide
caaaccccattttccaaataa

SEQ ID NO: 2427 - DNA, 22 bp, Artificial Sequence
  Description of Artificial Sequence: Synthetic oligonucleotide
cttaaattccaaaccccatttt

SEQ ID NO: 2428 - DNA, 24 bp, Artificial Sequence
  Description of Artificial Sequence: Synthetic oligonucleotide
aattacccaaaatcataaaacaaa

SEQ ID NO: 2429 - DNA, 25 bp, Artificial Sequence
  Description of Artificial Sequence: Synthetic oligonucleotide
cccattttccaaataaaaatactaa

SEQ ID NO: 2430 - DNA, 20 bp, Artificial Sequence
  Description of Artificial Sequence: Synthetic oligonucleotide
ctacccaactacaccccatc

SEQ ID NO: 2431 - DNA, 23 bp, Artificial Sequence
  Description of Artificial Sequence: Synthetic oligonucleotide
aaatcattctacccaactacacc

SEQ ID NO: 2432 - DNA, 24 bp, Artificial Sequence
  Description of Artificial Sequence: Synthetic oligonucleotide
caaatcattctacccaactacacc

SEQ ID NO: 2433 - DNA, 20 bp, Artificial Sequence
  Description of Artificial Sequence: Synthetic oligonucleotide
tacccaactacaccccatcc

SEQ ID NO: 2434 - DNA, 22 bp, Artificial Sequence
  Description of Artificial Sequence: Synthetic oligonucleotide
ttaaattccaaaccccattttc

SEQ ID NO: 2435 - DNA, 21 bp, Artificial Sequence
  Description of Artificial Sequence: Synthetic oligonucleotide
taaattccaaaccccattttc

SEQ ID NO: 2436 - DNA, 24 bp, Artificial Sequence
  Description of Artificial Sequence: Synthetic oligonucleotide
attacccaaaatcataaaacaaat

SEQ ID NO: 2437 - DNA, 21 bp, Artificial Sequence
  Description of Artificial Sequence: Synthetic oligonucleotide
ccttaaattccaaaccccatt

SEQ ID NO: 2438 - DNA, 24 bp, Artificial Sequence
  Description of Artificial Sequence: Synthetic oligonucleotide
ttacccaaaatcataaaacaaatc

SEQ ID NO: 2439 - DNA, 23 bp, Artificial Sequence
  Description of Artificial Sequence: Synthetic oligonucleotide
tacccaaaatcataaaacaaatc

SEQ ID NO: 2440 - DNA, 19 bp, Artificial Sequence
  Description of Artificial Sequence: Synthetic oligonucleotide
acccaactacaccccatcc

SEQ ID NO: 2441 - DNA, 18 bp, Artificial Sequence
  Description of Artificial Sequence: Synthetic oligonucleotide
aactacaccccatcccca

SEQ ID NO: 2442 - DNA, 18 bp, Artificial Sequence
  Description of Artificial Sequence: Synthetic oligonucleotide
ctacaccccatccccaac

SEQ ID NO: 2443 - DNA, 18 bp, Artificial Sequence
  Description of Artificial Sequence: Synthetic oligonucleotide
caactacaccccatcccc

SEQ ID NO: 2444 - DNA, 18 bp, Artificial Sequence
  Description of Artificial Sequence: Synthetic oligonucleotide
cccaactacaccccatcc

SEQ ID NO: 2445 - DNA, 25 bp, Artificial Sequence
  Description of Artificial Sequence: Synthetic oligonucleotide
ccattttccaaataaaaatactaaa

SEQ ID NO: 2446 - DNA, 20 bp, Artificial Sequence
  Description of Artificial Sequence: Synthetic oligonucleotide
aaattccaaaccccattttc

SEQ ID NO: 2447 - DNA, 27 bp, Artificial Sequence
  Description of Artificial Sequence: Synthetic oligonucleotide
cattttccaaataaaaatactaaaacc

SEQ ID NO: 2448 - DNA, 20 bp, Artificial Sequence
  Description of Artificial Sequence: Synthetic oligonucleotide
catccccaacctttcaataa

SEQ ID NO: 2449 - DNA, 18 bp, Artificial Sequence
  Description of Artificial Sequence: Synthetic oligonucleotide
actacaccccatccccaa

SEQ ID NO: 2450 - DNA, 18 bp, Artificial Sequence
  Description of Artificial Sequence: Synthetic oligonucleotide
ccaactacaccccatccc

SEQ ID NO: 2451 - DNA, 25 bp, Artificial Sequence
  Description of Artificial Sequence: Synthetic oligonucleotide
taaattacccaaaatcataaaacaa

SEQ ID NO: 2452 - DNA, 25 bp, Artificial Sequence
  Description of Artificial Sequence: Synthetic oligonucleotide
tcaataaattacccaaaatcataaa

SEQ ID NO: 2453 - DNA, 20 bp, Artificial Sequence
  Description of Artificial Sequence: Synthetic oligonucleotide
ccatccccaacctttcaata

SEQ ID NO: 2454 - DNA, 26 bp, Artificial Sequence
  Description of Artificial Sequence: Synthetic oligonucleotide
ttttccaaataaaaatactaaaaccc

SEQ ID NO: 2455 - DNA, 20 bp, Artificial Sequence
  Description of Artificial Sequence: Synthetic oligonucleotide
aattccaaaccccattttcc

SEQ ID NO: 2456 - DNA, 25 bp, Artificial Sequence
  Description of Artificial Sequence: Synthetic oligonucleotide
tttccaaataaaaatactaaaaccc

SEQ ID NO: 2457 - DNA, 25 bp, Artificial Sequence
  Description of Artificial Sequence: Synthetic oligonucleotide
aatcaataaattacccaaaatcata

SEQ ID NO: 2458 - DNA, 25 bp, Artificial Sequence
  Description of Artificial Sequence: Synthetic oligonucleotide
atcaataaattacccaaaatcataa

SEQ ID NO: 2459 - DNA, 25 bp, Artificial Sequence
  Description of Artificial Sequence: Synthetic oligonucleotide
ataaattacccaaaatcataaaaca

SEQ ID NO: 2460 - DNA, 17 bp, Artificial Sequence
  Description of Artificial Sequence: Synthetic oligonucleotide
cccatccccaacctttc

SEQ ID NO: 2461 - DNA, 17 bp, Artificial Sequence
  Description of Artificial Sequence: Synthetic oligonucleotide
tacaccccatccccaac

SEQ ID NO: 2462 - DNA, 17 bp, Artificial Sequence
  Description of Artificial Sequence: Synthetic oligonucleotide
accccatccccaacctt

SEQ ID NO: 2463 - DNA, 18 bp, Artificial Sequence
  Description of Artificial Sequence: Synthetic oligonucleotide
ccaaaccccattttccaa

SEQ ID NO: 2464 - DNA, 25 bp, Artificial Sequence
  Description of Artificial Sequence: Synthetic oligonucleotide
atttagtgttttggggagagttgga

SEQ ID NO: 2465 - DNA, 25 bp, Artificial Sequence
  Description of Artificial Sequence: Synthetic oligonucleotide
aatttagtgttttggggagagttgg

SEQ ID NO: 2466 - DNA, 26 bp, Artificial Sequence
  Description of Artificial Sequence: Synthetic oligonucleotide
gaatttagtgttttggggagagttgg

SEQ ID NO: 2467 - DNA, 26 bp, Artificial Sequence
  Description of Artificial Sequence: Synthetic oligonucleotide
atttagtgttttggggagagttggaa

SEQ ID NO: 2468 - DNA, 26 bp, Artificial Sequence
  Description of Artificial Sequence: Synthetic oligonucleotide
aatttagtgttttggggagagttgga

SEQ ID NO: 2469 - DNA, 25 bp, Artificial Sequence
  Description of Artificial Sequence: Synthetic oligonucleotide
gatggtgtttatttgttttggtagt

SEQ ID NO: 2470 - DNA, 26 bp, Artificial Sequence
  Description of Artificial Sequence: Synthetic oligonucleotide
cctaatctctctaaacctcaattttc

SEQ ID NO: 2471 - DNA, 26 bp, Artificial Sequence
  Description of Artificial Sequence: Synthetic oligonucleotide
gatcgatattgcgaacgttgtgttgg

SEQ ID NO: 2472 - DNA, 27 bp, Artificial Sequence
  Description of Artificial Sequence: Synthetic oligonucleotide
ggtagtgatgattgatattgtgaatgt

SEQ ID NO: 2473 - DNA, 24 bp, Artificial Sequence
  Description of Artificial Sequence: Synthetic oligonucleotide
tctctaaacctcaattttctcttc

SEQ ID NO: 2474 - DNA, 25 bp, Artificial Sequence
  Description of Artificial Sequence: Synthetic oligonucleotide
ctctctaaacctcaattttctcttc

SEQ ID NO: 2475 - DNA, 27 bp, Artificial Sequence
  Description of Artificial Sequence: Synthetic oligonucleotide
aatctctctaaacctcaattttctctt

SEQ ID NO: 2476 - DNA, 27 bp, Artificial Sequence
  Description of Artificial Sequence: Synthetic oligonucleotide
acctaatctctctaaacctcaattttc

SEQ ID NO: 2477 - DNA, 26 bp, Artificial Sequence
  Description of Artificial Sequence: Synthetic oligonucleotide
atctctctaaacctcaattttctctt

SEQ ID NO: 2478 - DNA, 26 bp, Artificial Sequence
  Description of Artificial Sequence: Synthetic oligonucleotide
taatctctctaaacctcaattttctc

SEQ ID NO: 2479 - DNA, 27 bp, Artificial Sequence
  Description of Artificial Sequence: Synthetic oligonucleotide
ctaatctctctaaacctcaattttctc

SEQ ID NO: 2480 - DNA, 26 bp, Artificial Sequence
  Description of Artificial Sequence: Synthetic oligonucleotide
ctctaaacctcaattttctcttctat

SEQ ID NO: 2481 - DNA, 24 bp, Artificial Sequence
  Description of Artificial Sequence: Synthetic oligonucleotide
cacctaatctctctaaacctcaat

SEQ ID NO: 2482 - DNA, 28 bp, Artificial Sequence
  Description of Artificial Sequence: Synthetic oligonucleotide
ggtagtgatgattgatattgtgaatgtt

SEQ ID NO: 2483 - DNA, 25 bp, Artificial Sequence
  Description of Artificial Sequence: Synthetic oligonucleotide
agatggtgtttatttgttttggtag

SEQ ID NO: 2484 - DNA, 28 bp, Artificial Sequence
  Description of Artificial Sequence: Synthetic oligonucleotide
tggtagtgatgattgatattgtgaatgt

SEQ ID NO: 2485 - DNA, 26 bp, Artificial Sequence
  Description of Artificial Sequence: Synthetic oligonucleotide
tagatggtgtttatttgttttggtag

SEQ ID NO: 2486 - DNA, 22 bp, Artificial Sequence
  Description of Artificial Sequence: Synthetic oligonucleotide
tcccctatctctccacctttat

SEQ ID NO: 2487 - DNA, 23 bp, Artificial Sequence
  Description of Artificial Sequence: Synthetic oligonucleotide
aggaagtaagattttggtttgtg

SEQ ID NO: 2488 - DNA, 26 bp, Artificial Sequence
  Description of Artificial Sequence: Synthetic oligonucleotide
aaacgactcgtaaacatcgtccatca

SEQ ID NO: 2489 - DNA, 27 bp, Artificial Sequence
  Description of Artificial Sequence: Synthetic oligonucleotide
tccacctttatcaaaaaacaactcata

SEQ ID NO: 2490 - DNA, 22 bp, Artificial Sequence
  Description of Artificial Sequence: Synthetic oligonucleotide
ggaagtaagattttggtttgtg

SEQ ID NO: 2491 - DNA, 24 bp, Artificial Sequence
  Description of Artificial Sequence: Synthetic oligonucleotide
taggaagtaagattttggtttgtg

SEQ ID NO: 2492 - DNA, 25 bp, Artificial Sequence
  Description of Artificial Sequence: Synthetic oligonucleotide
ataggaagtaagattttggtttgtg

SEQ ID NO: 2493 - DNA, 26 bp, Artificial Sequence
  Description of Artificial Sequence: Synthetic oligonucleotide
gaagtaagattttggtttgtgtagtt

SEQ ID NO: 2494 - DNA, 22 bp, Artificial Sequence
  Description of Artificial Sequence: Synthetic oligonucleotide
ctcccctatctctccaccttta

SEQ ID NO: 2495 - DNA, 21 bp, Artificial Sequence
  Description of Artificial Sequence: Synthetic oligonucleotide
actcccctatctctccacctt

SEQ ID NO: 2496 - DNA, 21 bp, Artificial Sequence
  Description of Artificial Sequence: Synthetic oligonucleotide
cccctatctctccacctttat

SEQ ID NO: 2497 - DNA, 28 bp, Artificial Sequence
  Description of Artificial Sequence: Synthetic oligonucleotide
tccacctttatcaaaaaacaactcataa

SEQ ID NO: 2498 - DNA, 28 bp, Artificial Sequence
  Description of Artificial Sequence: Synthetic oligonucleotide
ctccacctttatcaaaaaacaactcata

SEQ ID NO: 2499 - DNA, 28 bp, Artificial Sequence
  Description of Artificial Sequence: Synthetic oligonucleotide
ccacctttatcaaaaaacaactcataaa

SEQ ID NO: 2500 - DNA, 29 bp, Artificial Sequence
  Description of Artificial Sequence: Synthetic oligonucleotide
ccacctttatcaaaaaacaactcataaac

SEQ ID NO: 2501 - DNA, 29 bp, Artificial Sequence
  Description of Artificial Sequence: Synthetic oligonucleotide
tctccacctttatcaaaaaacaactcata

SEQ ID NO: 2502 - DNA, 21 bp, Artificial Sequence
  Description of Artificial Sequence: Synthetic oligonucleotide
tcccctatctctccaccttta

SEQ ID NO: 2503 - DNA, 20 bp, Artificial Sequence
  Description of Artificial Sequence: Synthetic oligonucleotide
cccctatctctccaccttta

SEQ ID NO: 2504 - DNA, 29 bp, Artificial Sequence
  Description of Artificial Sequence: Synthetic oligonucleotide
ctccacctttatcaaaaaacaactcataa

SEQ ID NO: 2505 - DNA, 29 bp, Artificial Sequence
  Description of Artificial Sequence: Synthetic oligonucleotide
acctttatcaaaaaacaactcataaacat

SEQ ID NO: 2506 - DNA, 22 bp, Artificial Sequence
  Description of Artificial Sequence: Synthetic oligonucleotide
actcccctatctctccaccttt

SEQ ID NO: 2507 - DNA, 29 bp, Artificial Sequence
  Description of Artificial Sequence: Synthetic oligonucleotide
tccacctttatcaaaaaacaactcataaa

SEQ ID NO: 2508 - DNA, 29 bp, Artificial Sequence
  Description of Artificial Sequence: Synthetic oligonucleotide
cctttatcaaaaaacaactcataaacatc

SEQ ID NO: 2509 - DNA, 23 bp, Artificial Sequence
  Description of Artificial Sequence: Synthetic oligonucleotide
actcccctatctctccaccttta

SEQ ID NO: 2510 - DNA, 29 bp, Artificial Sequence
  Description of Artificial Sequence: Synthetic oligonucleotide
cacctttatcaaaaaacaactcataaaca

SEQ ID NO: 2511 - DNA, 30 bp, Artificial Sequence
  Description of Artificial Sequence: Synthetic oligonucleotide
ccacctttatcaaaaaacaactcataaaca

SEQ ID NO: 2512 - DNA, 30 bp, Artificial Sequence
  Description of Artificial Sequence: Synthetic oligonucleotide
acctttatcaaaaaacaactcataaacatc

SEQ ID NO: 2513 - DNA, 30 bp, Artificial Sequence
  Description of Artificial Sequence: Synthetic oligonucleotide
tccacctttatcaaaaaacaactcataaac

SEQ ID NO: 2514 - DNA, 30 bp, Artificial Sequence
  Description of Artificial Sequence: Synthetic oligonucleotide
tctccacctttatcaaaaaacaactcataa

SEQ ID NO: 2515 - DNA, 30 bp, Artificial Sequence
  Description of Artificial Sequence: Synthetic oligonucleotide
ctctccacctttatcaaaaaacaactcata

SEQ ID NO: 2516 - DNA, 21 bp, Artificial Sequence
  Description of Artificial Sequence: Synthetic oligonucleotide
ctcccctatctctccaccttt

SEQ ID NO: 2517 - DNA, 20 bp, Artificial Sequence
  Description of Artificial Sequence: Synthetic oligonucleotide
tcccctatctctccaccttt

SEQ ID NO: 2518 - DNA, 19 bp, Artificial Sequence
  Description of Artificial Sequence: Synthetic oligonucleotide
cccctatctctccaccttt

SEQ ID NO: 2519 - DNA, 30 bp, Artificial Sequence
  Description of Artificial Sequence: Synthetic oligonucleotide
cacctttatcaaaaaacaactcataaacat

SEQ ID NO: 2520 - DNA, 30 bp, Artificial Sequence
  Description of Artificial Sequence: Synthetic oligonucleotide
ctccacctttatcaaaaaacaactcataaa

SEQ ID NO: 2521 - DNA, 31 bp, Artificial Sequence
  Description of Artificial Sequence: Synthetic oligonucleotide
cacctttatcaaaaaacaactcataaacatc

SEQ ID NO: 2522 - DNA, 31 bp, Artificial Sequence
  Description of Artificial Sequence: Synthetic oligonucleotide
tctctccacctttatcaaaaaacaactcata

SEQ ID NO: 2523 - DNA, 20 bp, Artificial Sequence
  Description of Artificial Sequence: Synthetic oligonucleotide
ctcccctatctctccacctt

SEQ ID NO: 2524 - DNA, 19 bp, Artificial Sequence
  Description of Artificial Sequence: Synthetic oligonucleotide
tcccctatctctccacctt

SEQ ID NO: 2525 - DNA, 31 bp, Artificial Sequence
  Description of Artificial Sequence: Synthetic oligonucleotide
ctccacctttatcaaaaaacaactcataaac

SEQ ID NO: 2526 - DNA, 31 bp, Artificial Sequence
  Description of Artificial Sequence: Synthetic oligonucleotide
tctccacctttatcaaaaaacaactcataaa

SEQ ID NO: 2527 - DNA, 31 bp, Artificial Sequence
  Description of Artificial Sequence: Synthetic oligonucleotide
ctctccacctttatcaaaaaacaactcataa

SEQ ID NO: 2528 - DNA, 31 bp, Artificial Sequence
  Description of Artificial Sequence: Synthetic oligonucleotide
tccacctttatcaaaaaacaactcataaaca

SEQ ID NO: 2529 - DNA, 31 bp, Artificial Sequence
  Description of Artificial Sequence: Synthetic oligonucleotide
ccacctttatcaaaaaacaactcataaacat

SEQ ID NO: 2530 - DNA, 32 bp, Artificial Sequence
  Description of Artificial Sequence: Synthetic oligonucleotide
ctccacctttatcaaaaaacaactcataaaca

SEQ ID NO: 2531 - DNA, 32 bp, Artificial Sequence
  Description of Artificial Sequence: Synthetic oligonucleotide
tccacctttatcaaaaaacaactcataaacat

SEQ ID NO: 2532 - DNA, 32 bp, Artificial Sequence
  Description of Artificial Sequence: Synthetic oligonucleotide
ccacctttatcaaaaaacaactcataaacatc

SEQ ID NO: 2533 - DNA, 20 bp, Artificial Sequence
  Description of Artificial Sequence: Synthetic oligonucleotide
actcccctatctctccacct

SEQ ID NO: 2534 - DNA, 32 bp, Artificial Sequence
  Description of Artificial Sequence: Synthetic oligonucleotide
atctctccacctttatcaaaaaacaactcata

SEQ ID NO: 2535 - DNA, 32 bp, Artificial Sequence
  Description of Artificial Sequence: Synthetic oligonucleotide
tctccacctttatcaaaaaacaactcataaac

SEQ ID NO: 2536 - DNA, 32 bp, Artificial Sequence
  Description of Artificial Sequence: Synthetic oligonucleotide
ctctccacctttatcaaaaaacaactcataaa

SEQ ID NO: 2537 - DNA, 32 bp, Artificial Sequence
  Description of Artificial Sequence: Synthetic oligonucleotide
tctctccacctttatcaaaaaacaactcataa

SEQ ID NO: 2538 - DNA, 19 bp, Artificial Sequence
  Description of Artificial Sequence: Synthetic oligonucleotide
actcccctatctctccacc

SEQ ID NO: 2539 - DNA, 33 bp, Artificial Sequence
  Description of Artificial Sequence: Synthetic oligonucleotide
tatctctccacctttatcaaaaaacaactcata

SEQ ID NO: 2540 - DNA, 33 bp, Artificial Sequence
  Description of Artificial Sequence: Synthetic oligonucleotide
tctctccacctttatcaaaaaacaactcataaa

SEQ ID NO: 2541 - DNA, 33 bp, Artificial Sequence
  Description of Artificial Sequence: Synthetic oligonucleotide
atctctccacctttatcaaaaaacaactcataa

SEQ ID NO: 2542 - DNA, 33 bp, Artificial Sequence
  Description of Artificial Sequence: Synthetic oligonucleotide
tccacctttatcaaaaaacaactcataaacatc

SEQ ID NO: 2543 - DNA, 33 bp, Artificial Sequence
  Description of Artificial Sequence: Synthetic oligonucleotide
ctctccacctttatcaaaaaacaactcataaac

SEQ ID NO: 2544 - DNA, 33 bp, Artificial Sequence
  Description of Artificial Sequence: Synthetic oligonucleotide
ctccacctttatcaaaaaacaactcataaacat

SEQ ID NO: 2545 - DNA, 34 bp, Artificial Sequence
  Description of Artificial Sequence: Synthetic oligonucleotide
tatctctccacctttatcaaaaaacaactcataa

SEQ ID NO: 2546 - DNA, 33 bp, Artificial Sequence
  Description of Artificial Sequence: Synthetic oligonucleotide
cctttatcaaaaaacaactcataaacatcatcc

SEQ ID NO: 2547 - DNA, 33 bp, Artificial Sequence
  Description of Artificial Sequence: Synthetic oligonucleotide
ctttatcaaaaaacaactcataaacatcatcca

SEQ ID NO: 2548 - DNA, 23 bp, Artificial Sequence
  Description of Artificial Sequence: Synthetic oligonucleotide
ctcccctatctctccacctttat

SEQ ID NO: 2549 - DNA, 24 bp, Artificial Sequence
  Description of Artificial Sequence: Synthetic oligonucleotide
actcccctatctctccacctttat

SEQ ID NO: 2550 - DNA, 33 bp, Artificial Sequence
  Description of Artificial Sequence: Synthetic oligonucleotide
acctttatcaaaaaacaactcataaacatcatc

SEQ ID NO: 2551 - DNA, 34 bp, Artificial Sequence
  Description of Artificial Sequence: Synthetic oligonucleotide
ctttatcaaaaaacaactcataaacatcatccat

SEQ ID NO: 2552 - DNA, 34 bp, Artificial Sequence
  Description of Artificial Sequence: Synthetic oligonucleotide
acctttatcaaaaaacaactcataaacatcatcc

SEQ ID NO: 2553 - DNA, 34 bp, Artificial Sequence
  Description of Artificial Sequence: Synthetic oligonucleotide
cctttatcaaaaaacaactcataaacatcatcca

SEQ ID NO: 2554 - DNA, 34 bp, Artificial Sequence
  Description of Artificial Sequence: Synthetic oligonucleotide
cacctttatcaaaaaacaactcataaacatcatc

SEQ ID NO: 2555 - DNA, 22 bp, Artificial Sequence
  Description of Artificial Sequence: Synthetic oligonucleotide
taggtggaaagggataaatagg

SEQ ID NO: 2556 - DNA, 21 bp, Artificial Sequence
  Description of Artificial Sequence: Synthetic oligonucleotide
caaaaactcccaaaaccttta

SEQ ID NO: 2557 - DNA, 28 bp, Artificial Sequence
  Description of Artificial Sequence: Synthetic oligonucleotide
ggtttatttgtacgcgtttttcgaagtg

SEQ ID NO: 2558 - DNA, 30 bp, Artificial Sequence
  Description of Artificial Sequence: Synthetic oligonucleotide
aataggtttatttgtatgtgttttttgaag

SEQ ID NO: 2559 - DNA, 23 bp, Artificial Sequence
  Description of Artificial Sequence: Synthetic oligonucleotide
gtaggtggaaagggataaatagg

SEQ ID NO: 2560 - DNA, 24 bp, Artificial Sequence
  Description of Artificial Sequence: Synthetic oligonucleotide
tgtaggtggaaagggataaatagg

SEQ ID NO: 2561 - DNA, 25 bp, Artificial Sequence
  Description of Artificial Sequence: Synthetic oligonucleotide
atgtaggtggaaagggataaatagg

SEQ ID NO: 2562 - DNA, 26 bp, Artificial Sequence
  Description of Artificial Sequence: Synthetic oligonucleotide
tatgtaggtggaaagggataaatagg

SEQ ID NO: 2563 - DNA, 31 bp, Artificial Sequence
  Description of Artificial Sequence: Synthetic oligonucleotide
aataggtttatttgtatgtgttttttgaagt

SEQ ID NO: 2564 - DNA, 31 bp, Artificial Sequence
  Description of Artificial Sequence: Synthetic oligonucleotide
aaataggtttatttgtatgtgttttttgaag

SEQ ID NO: 2565 - DNA, 23 bp, Artificial Sequence
  Description of Artificial Sequence: Synthetic oligonucleotide
tgtaggtggaaagggataaatag

SEQ ID NO: 2566 - DNA, 24 bp, Artificial Sequence
  Description of Artificial Sequence: Synthetic oligonucleotide
atgtaggtggaaagggataaatag

SEQ ID NO: 2567 - DNA, 25 bp, Artificial Sequence
  Description of Artificial Sequence: Synthetic oligonucleotide
tatgtaggtggaaagggataaatag

SEQ ID NO: 2568 - DNA, 26 bp, Artificial Sequence
  Description of Artificial Sequence: Synthetic oligonucleotide
ttatgtaggtggaaagggataaatag

SEQ ID NO: 2569 - DNA, 27 bp, Artificial Sequence
  Description of Artificial Sequence: Synthetic oligonucleotide
attatgtaggtggaaagggataaatag

SEQ ID NO: 2570 - DNA, 28 bp, Artificial Sequence
  Description of Artificial Sequence: Synthetic oligonucleotide
tattatgtaggtggaaagggataaatag

SEQ ID NO: 2571 - DNA, 29 bp, Artificial Sequence
  Description of Artificial Sequence: Synthetic oligonucleotide
ttattatgtaggtggaaagggataaatag

SEQ ID NO: 2572 - DNA, 32 bp, Artificial Sequence
  Description of Artificial Sequence: Synthetic oligonucleotide
taaataggtttatttgtatgtgttttttgaag

SEQ ID NO: 2573 - DNA, 23 bp, Artificial Sequence
  Description of Artificial Sequence: Synthetic oligonucleotide
atgtaggtggaaagggataaata

SEQ ID NO: 2574 - DNA, 25 bp, Artificial Sequence
  Description of Artificial Sequence: Synthetic oligonucleotide
ttatgtaggtggaaagggataaata

SEQ ID NO: 2575 - DNA, 24 bp, Artificial Sequence
  Description of Artificial Sequence: Synthetic oligonucleotide
tatgtaggtggaaagggataaata

SEQ ID NO: 2576 - DNA, 26 bp, Artificial Sequence
  Description of Artificial Sequence: Synthetic oligonucleotide
attatgtaggtggaaagggataaata

SEQ ID NO: 2577 - DNA, 27 bp, Artificial Sequence
  Description of Artificial Sequence: Synthetic oligonucleotide
tattatgtaggtggaaagggataaata

SEQ ID NO: 2578 - DNA, 28 bp, Artificial Sequence
  Description of Artificial Sequence: Synthetic oligonucleotide
ttattatgtaggtggaaagggataaata

SEQ ID NO: 2579 - DNA, 29 bp, Artificial Sequence
  Description of Artificial Sequence: Synthetic oligonucleotide
tttattatgtaggtggaaagggataaata

SEQ ID NO: 2580 - DNA, 33 bp, Artificial Sequence
  Description of Artificial Sequence: Synthetic oligonucleotide
gataaataggtttatttgtatgtgttttttgaa

SEQ ID NO: 2581 - DNA, 33 bp, Artificial Sequence
  Description of Artificial Sequence: Synthetic oligonucleotide
ataaataggtttatttgtatgtgttttttgaag

SEQ ID NO: 2582 - DNA, 22 bp, Artificial Sequence
  Description of Artificial Sequence: Synthetic oligonucleotide
atttttaggtggggtttagatt

SEQ ID NO: 2583 - DNA, 18 bp, Artificial Sequence
  Description of Artificial Sequence: Synthetic oligonucleotide
atttcccctccccaattc

SEQ ID NO: 2584 - DNA, 25 bp, Artificial Sequence
  Description of Artificial Sequence: Synthetic oligonucleotide
gtggggtttagattcgaggtcgttg

SEQ ID NO: 2585 - DNA, 24 bp, Artificial Sequence
  Description of Artificial Sequence: Synthetic oligonucleotide
ttagatttgaggttgttgtgggtt

SEQ ID NO: 2586 - DNA, 19 bp, Artificial Sequence
  Description of Artificial Sequence: Synthetic oligonucleotide
aatttcccctccccaattc

SEQ ID NO: 2587 - DNA, 17 bp, Artificial Sequence
  Description of Artificial Sequence: Synthetic oligonucleotide
tttcccctccccaattc

SEQ ID NO: 2588 - DNA, 17 bp, Artificial Sequence
  Description of Artificial Sequence: Synthetic oligonucleotide
ccctccccaattcccta

SEQ ID NO: 2589 - DNA, 18 bp, Artificial Sequence
  Description of Artificial Sequence: Synthetic oligonucleotide
cctccccaattccctaac

SEQ ID NO: 2590 - DNA, 18 bp, Artificial Sequence
  Description of Artificial Sequence: Synthetic oligonucleotide
ctccccaattccctaacc

SEQ ID NO: 2591 - DNA, 17 bp, Artificial Sequence
  Description of Artificial Sequence: Synthetic oligonucleotide
tccccaattccctaacc

SEQ ID NO: 2592 - DNA, 23 bp, Artificial Sequence
  Description of Artificial Sequence: Synthetic oligonucleotide
tatttttaggtggggtttagatt

SEQ ID NO: 2593 - DNA, 23 bp, Artificial Sequence
  Description of Artificial Sequence: Synthetic oligonucleotide
ttatttttaggtggggtttagat

SEQ ID NO: 2594 - DNA, 24 bp, Artificial Sequence
  Description of Artificial Sequence: Synthetic oligonucleotide
tttagatttgaggttgttgtgggt

SEQ ID NO: 2595 - DNA, 25 bp, Artificial Sequence
  Description of Artificial Sequence: Synthetic oligonucleotide
ggtttagatttgaggttgttgtggg

SEQ ID NO: 2596 - DNA, 25 bp, Artificial Sequence
  Description of Artificial Sequence: Synthetic oligonucleotide
gtttagatttgaggttgttgtgggt

SEQ ID NO: 2597 - DNA, 25 bp, Artificial Sequence
  Description of Artificial Sequence: Synthetic oligonucleotide
tttagatttgaggttgttgtgggtt

SEQ ID NO: 2598 - DNA, 25 bp, Artificial Sequence
  Description of Artificial Sequence: Synthetic oligonucleotide
gggtttagatttgaggttgttgtgg

SEQ ID NO: 2599 - DNA, 26 bp, Artificial Sequence
  Description of Artificial Sequence: Synthetic oligonucleotide
gtttagatttgaggttgttgtgggtt

SEQ ID NO: 2600 - DNA, 26 bp, Artificial Sequence
  Description of Artificial Sequence: Synthetic oligonucleotide
aaagttttggagtatatgataggtgt

SEQ ID NO: 2601 - DNA, 21 bp, Artificial Sequence
  Description of Artificial Sequence: Synthetic oligonucleotide
caaaccataaccaccctcaac

SEQ ID NO: 2602 - DNA, 33 bp, Artificial Sequence
  Description of Artificial Sequence: Synthetic oligonucleotide
tagaaacgttcgtttcgttttttgattagtatt

SEQ ID NO: 2603 - DNA, 29 bp, Artificial Sequence
  Description of Artificial Sequence: Synthetic oligonucleotide
gataggtgttatagaaatgtttgttttgt

SEQ ID NO: 2604 - DNA, 22 bp, Artificial Sequence
  Description of Artificial Sequence: Synthetic oligonucleotide
tatcaaaccataaccaccctca

SEQ ID NO: 2605 - DNA, 22 bp, Artificial Sequence
  Description of Artificial Sequence: Synthetic oligonucleotide
ttatcaaaccataaccaccctc

SEQ ID NO: 2606 - DNA, 21 bp, Artificial Sequence
  Description of Artificial Sequence: Synthetic oligonucleotide
atcaaaccataaccaccctca

SEQ ID NO: 2607 - DNA, 20 bp, Artificial Sequence
  Description of Artificial Sequence: Synthetic oligonucleotide
aaaccataaccaccctcaac

SEQ ID NO: 2608 - DNA, 22 bp, Artificial Sequence
  Description of Artificial Sequence: Synthetic oligonucleotide
aattatcaaaccataaccaccc

SEQ ID NO: 2609 - DNA, 23 bp, Artificial Sequence
  Description of Artificial Sequence: Synthetic oligonucleotide
attatcaaaccataaccaccctc

SEQ ID NO: 2610 - DNA, 19 bp, Artificial Sequence
  Description of Artificial Sequence: Synthetic oligonucleotide
accataaccaccctcaacc

SEQ ID NO: 2611 - DNA, 19 bp, Artificial Sequence
  Description of Artificial Sequence: Synthetic oligonucleotide
ccataaccaccctcaacca

SEQ ID NO: 2612 - DNA, 26 bp, Artificial Sequence
  Description of Artificial Sequence: Synthetic oligonucleotide
aagttttggagtatatgataggtgtt

SEQ ID NO: 2613 - DNA, 30 bp, Artificial Sequence
  Description of Artificial Sequence: Synthetic oligonucleotide
tgataggtgttatagaaatgtttgttttgt

SEQ ID NO: 2614 - DNA, 22 bp, Artificial Sequence
  Description of Artificial Sequence: Synthetic oligonucleotide
cacttctcacacatactttccc

SEQ ID NO: 2615 - DNA, 22 bp, Artificial Sequence
  Description of Artificial Sequence: Synthetic oligonucleotide
tggtttggtagggagttgttta

SEQ ID NO: 2616 - DNA, 25 bp, Artificial Sequence
  Description of Artificial Sequence: Synthetic oligonucleotide
tttccctaaaacgaaactacgcgca

SEQ ID NO: 2617 - DNA, 26 bp, Artificial Sequence
  Description of Artificial Sequence: Synthetic oligonucleotide
ctttccctaaaacaaaactacacaca

SEQ ID NO: 2618 - DNA, 21 bp, Artificial Sequence
  Description of Artificial Sequence: Synthetic oligonucleotide
gtggtttggtagggagttgtt

SEQ ID NO: 2619 - DNA, 23 bp, Artificial Sequence
  Description of Artificial Sequence: Synthetic oligonucleotide
ggtttggtagggagttgtttatt

SEQ ID NO: 2620 - DNA, 22 bp, Artificial Sequence
  Description of Artificial Sequence: Synthetic oligonucleotide
ggataggtaggtgggtatggtt

SEQ ID NO: 2621 - DNA, 21 bp, Artificial Sequence
  Description of Artificial Sequence: Synthetic oligonucleotide
aaggtggtttggtagggagtt

SEQ ID NO: 2622 - DNA, 22 bp, Artificial Sequence
  Description of Artificial Sequence: Synthetic oligonucleotide
aggataggtaggtgggtatggt

SEQ ID NO: 2623 - DNA, 20 bp, Artificial Sequence
  Description of Artificial Sequence: Synthetic oligonucleotide
aggtggtttggtagggagtt

SEQ ID NO: 2624 - DNA, 20 bp, Artificial Sequence
  Description of Artificial Sequence: Synthetic oligonucleotide
ggtggtttggtagggagttg

SEQ ID NO: 2625 - DNA, 21 bp, Artificial Sequence
  Description of Artificial Sequence: Synthetic oligonucleotide
gttttatggaggtggggattt

SEQ ID NO: 2626 - DNA, 20 bp, Artificial Sequence
  Description of Artificial Sequence: Synthetic oligonucleotide
ttatggaggtggggattttt

SEQ ID NO: 2627 - DNA, 20 bp, Artificial Sequence
  Description of Artificial Sequence: Synthetic oligonucleotide
tttatggaggtggggatttt

SEQ ID NO: 2628 - DNA, 20 bp, Artificial Sequence
  Description of Artificial Sequence: Synthetic oligonucleotide
ttttatggaggtggggattt

SEQ ID NO: 2629 - DNA, 25 bp, Artificial Sequence
  Description of Artificial Sequence: Synthetic oligonucleotide
tttggtagggagttgtttattagag

SEQ ID NO: 2630 - DNA, 25 bp, Artificial Sequence
  Description of Artificial Sequence: Synthetic oligonucleotide
gggagttgtttattagagattgaga

SEQ ID NO: 2631 - DNA, 26 bp, Artificial Sequence
  Description of Artificial Sequence: Synthetic oligonucleotide
gtttggtagggagttgtttattagag

SEQ ID NO: 2632 - DNA, 24 bp, Artificial Sequence
  Description of Artificial Sequence: Synthetic oligonucleotide
ttggtagggagttgtttattagag

SEQ ID NO: 2633 - DNA, 19 bp, Artificial Sequence
  Description of Artificial Sequence: Synthetic oligonucleotide
aaaggtggtttggtaggga

SEQ ID NO: 2634 - DNA, 26 bp, Artificial Sequence
  Description of Artificial Sequence: Synthetic oligonucleotide
ggtagggagttgtttattagagattg

SEQ ID NO: 2635 - DNA, 26 bp, Artificial Sequence
  Description of Artificial Sequence: Synthetic oligonucleotide
tggtagggagttgtttattagagatt

SEQ ID NO: 2636 - DNA, 26 bp, Artificial Sequence
  Description of Artificial Sequence: Synthetic oligonucleotide
agggagttgtttattagagattgaga

SEQ ID NO: 2637 - DNA, 20 bp, Artificial Sequence
  Description of Artificial Sequence: Synthetic oligonucleotide
tgttttatggaggtggggat

SEQ ID NO: 2638 - DNA, 23 bp, Artificial Sequence
  Description of Artificial Sequence: Synthetic oligonucleotide
gaggataggtaggtgggtatggt

SEQ ID NO: 2639 - DNA, 24 bp, Artificial Sequence
  Description of Artificial Sequence: Synthetic oligonucleotide
ttaattggtttagagaaagaaagg

SEQ ID NO: 2640 - DNA, 25 bp, Artificial Sequence
  Description of Artificial Sequence: Synthetic oligonucleotide
gttaattggtttagagaaagaaagg

SEQ ID NO: 2641 - DNA, 23 bp, Artificial Sequence
  Description of Artificial Sequence: Synthetic oligonucleotide
gataggtaggtgggtatggttat

SEQ ID NO: 2642 - DNA, 27 bp, Artificial Sequence
  Description of Artificial Sequence: Synthetic oligonucleotide
tagggagttgtttattagagattgaga

SEQ ID NO: 2643 - DNA, 19 bp, Artificial Sequence
  Description of Artificial Sequence: Synthetic oligonucleotide
tatggaggtggggattttt

SEQ ID NO: 2644 - DNA, 26 bp, Artificial Sequence
  Description of Artificial Sequence: Synthetic oligonucleotide
gtagggagttgtttattagagattga

SEQ ID NO: 2645 - DNA, 21 bp, Artificial Sequence
  Description of Artificial Sequence: Synthetic oligonucleotide
ggagaggataggtaggtgggt

SEQ ID NO: 2646 - DNA, 18 bp, Artificial Sequence
  Description of Artificial Sequence: Synthetic oligonucleotide
atggaggtggggattttt

SEQ ID NO: 2647 - DNA, 17 bp, Artificial Sequence
  Description of Artificial Sequence: Synthetic oligonucleotide
tggaggtggggattttt

SEQ ID NO: 2648 - DNA, 22 bp, Artificial Sequence
  Description of Artificial Sequence: Synthetic oligonucleotide
ccacttctcacacatactttcc

SEQ ID NO: 2649 - DNA, 23 bp, Artificial Sequence
  Description of Artificial Sequence: Synthetic oligonucleotide
accacttctcacacatactttcc

SEQ ID NO: 2650 - DNA, 24 bp, Artificial Sequence
  Description of Artificial Sequence: Synthetic oligonucleotide
caccacttctcacacatactttcc

SEQ ID NO: 2651 - DNA, 24 bp, Artificial Sequence
  Description of Artificial Sequence: Synthetic oligonucleotide
ttctcacacatactttccctaaaa

SEQ ID NO: 2652 - DNA, 25 bp, Artificial Sequence
  Description of Artificial Sequence: Synthetic oligonucleotide
cttctcacacatactttccctaaaa

SEQ ID NO: 2653 - DNA, 23 bp, Artificial Sequence
  Description of Artificial Sequence: Synthetic oligonucleotide
tctcacacatactttccctaaaa

SEQ ID NO: 2654 - DNA, 26 bp, Artificial Sequence
  Description of Artificial Sequence: Synthetic oligonucleotide
acttctcacacatactttccctaaaa

SEQ ID NO: 2655 - DNA, 18 bp, Artificial Sequence
  Description of Artificial Sequence: Synthetic oligonucleotide
ttttaggtgtgggggttt

SEQ ID NO: 2656 - DNA, 26 bp, Artificial Sequence
  Description of Artificial Sequence: Synthetic oligonucleotide
aaacttttcaatactaaatcatcctc

SEQ ID NO: 2657 - DNA, 23 bp, Artificial Sequence
  Description of Artificial Sequence: Synthetic oligonucleotide
ggagaagattgcgttcggtcgtg

SEQ ID NO: 2658 - DNA, 22 bp, Artificial Sequence
  Description of Artificial Sequence: Synthetic oligonucleotide
gggttttggggggtagtgatgt

SEQ ID NO: 2659 - DNA, 28 bp, Artificial Sequence
  Description of Artificial Sequence: Synthetic oligonucleotide
ttattacccaaactaaaatacaataaca

SEQ ID NO: 2660 - DNA, 22 bp, Artificial Sequence
  Description of Artificial Sequence: Synthetic oligonucleotide
atttagaaggttgagggaggag

SEQ ID NO: 2661 - DNA, 26 bp, Artificial Sequence
  Description of Artificial Sequence: Synthetic oligonucleotide
acctcctcctcccgaattcaaacgat

SEQ ID NO: 2662 - DNA, 25 bp, Artificial Sequence
  Description of Artificial Sequence: Synthetic oligonucleotide
ataacacaatctcaactcaccacaa

SEQ ID NO: 2663 - DNA, 22 bp, Artificial Sequence
  Description of Artificial Sequence: Synthetic oligonucleotide
tagaaggttgagggaggagaat

SEQ ID NO: 2664 - DNA, 22 bp, Artificial Sequence
  Description of Artificial Sequence: Synthetic oligonucleotide
ctcgactcaccgcaacctcctc

SEQ ID NO: 2665 - DNA, 23 bp, Artificial Sequence
  Description of Artificial Sequence: Synthetic oligonucleotide
tatttagaaggttgagggaggag

SEQ ID NO: 2666 - DNA, 21 bp, Artificial Sequence
  Description of Artificial Sequence: Synthetic oligonucleotide
ttagaaggttgagggaggaga

SEQ ID NO: 2667 - DNA, 21 bp, Artificial Sequence
  Description of Artificial Sequence: Synthetic oligonucleotide
agaaggttgagggaggagaat

SEQ ID NO: 2668 - DNA, 23 bp, Artificial Sequence
  Description of Artificial Sequence: Synthetic oligonucleotide
ttatttagaaggttgagggagga

SEQ ID NO: 2669 - DNA, 22 bp, Artificial Sequence
  Description of Artificial Sequence: Synthetic oligonucleotide
tttagaaggttgagggaggaga

SEQ ID NO: 2670 - DNA, 23 bp, Artificial Sequence
  Description of Artificial Sequence: Synthetic oligonucleotide
gttatttagaaggttgagggagg

SEQ ID NO: 2671 - DNA, 26 bp, Artificial Sequence
  Description of Artificial Sequence: Synthetic oligonucleotide
ctcctcctcccgaattcaaacgattc

SEQ ID NO: 2672 - DNA, 24 bp, Artificial Sequence
  Description of Artificial Sequence: Synthetic oligonucleotide
agttatttagaaggttgagggagg

SEQ ID NO: 2673 - DNA, 20 bp, Artificial Sequence
  Description of Artificial Sequence: Synthetic oligonucleotide
gaaggttgagggaggagaat

SEQ ID NO: 2674 - DNA, 25 bp, Artificial Sequence
  Description of Artificial Sequence: Synthetic oligonucleotide
tagttatttagaaggttgagggagg

SEQ ID NO: 2675 - DNA, 19 bp, Artificial Sequence
  Description of Artificial Sequence: Synthetic oligonucleotide
aaggttgagggaggagaat

SEQ ID NO: 2676 - DNA, 29 bp, Artificial Sequence
  Description of Artificial Sequence: Synthetic oligonucleotide
cttattacccaaactaaaatacaataaca

SEQ ID NO: 2677 - DNA, 30 bp, Artificial Sequence
  Description of Artificial Sequence: Synthetic oligonucleotide
tcttattacccaaactaaaatacaataaca

SEQ ID NO: 2678 - DNA, 31 bp, Artificial Sequence
  Description of Artificial Sequence: Synthetic oligonucleotide
ctcttattacccaaactaaaatacaataaca

SEQ ID NO: 2679 - DNA, 25 bp, Artificial Sequence
  Description of Artificial Sequence: Synthetic oligonucleotide
aataacacaatctcaactcaccaca

SEQ ID NO: 2680 - DNA, 30 bp, Artificial Sequence
  Description of Artificial Sequence: Synthetic oligonucleotide
ctcttattacccaaactaaaatacaataac

SEQ ID NO: 2681 - DNA, 22 bp, Artificial Sequence
  Description of Artificial Sequence: Synthetic oligonucleotide
accacccacttctcctataaaa

SEQ ID NO: 2682 - DNA, 20 bp, Artificial Sequence
  Description of Artificial Sequence: Synthetic oligonucleotide
ttggggttgggagagtagtt

SEQ ID NO: 2683 - DNA, 25 bp, Artificial Sequence
  Description of Artificial Sequence: Synthetic oligonucleotide
ccgacaaaaaatcccgcgaaaaacc

SEQ ID NO: 2684 - DNA, 24 bp, Artificial Sequence
  Description of Artificial Sequence: Synthetic oligonucleotide
tataaaaccacaatcccacccaac

SEQ ID NO: 2685 - DNA, 21 bp, Artificial Sequence
  Description of Artificial Sequence: Synthetic oligonucleotide
ggggttgggagagtagttttt

SEQ ID NO: 2686 - DNA, 20 bp, Artificial Sequence
  Description of Artificial Sequence: Synthetic oligonucleotide
tggggttgggagagtagttt

SEQ ID NO: 2687 - DNA, 24 bp, Artificial Sequence
  Description of Artificial Sequence: Synthetic oligonucleotide
tgggagagtagtttttagaggttt

SEQ ID NO: 2688 - DNA, 19 bp, Artificial Sequence
  Description of Artificial Sequence: Synthetic oligonucleotide
gttggggttgggagagtag

SEQ ID NO: 2689 - DNA, 25 bp, Artificial Sequence
  Description of Artificial Sequence: Synthetic oligonucleotide
ttgggagagtagtttttagaggttt

SEQ ID NO: 2690 - DNA, 23 bp, Artificial Sequence
  Description of Artificial Sequence: Synthetic oligonucleotide
taccacccacttctcctataaaa

SEQ ID NO: 2691 - DNA, 23 bp, Artificial Sequence
  Description of Artificial Sequence: Synthetic oligonucleotide
ttaccacccacttctcctataaa

SEQ ID NO: 2692 - DNA, 24 bp, Artificial Sequence
  Description of Artificial Sequence: Synthetic oligonucleotide
cttaccacccacttctcctataaa

SEQ ID NO: 2693 - DNA, 22 bp, Artificial Sequence
  Description of Artificial Sequence: Synthetic oligonucleotide
ccacccacttctcctataaaac

SEQ ID NO: 2694 - DNA, 25 bp, Artificial Sequence
  Description of Artificial Sequence: Synthetic oligonucleotide
acttaccacccacttctcctataaa

SEQ ID NO: 2695 - DNA, 22 bp, Artificial Sequence
  Description of Artificial Sequence: Synthetic oligonucleotide
acccacttctcctataaaacca

SEQ ID NO: 2696 - DNA, 22 bp, Artificial Sequence
  Description of Artificial Sequence: Synthetic oligonucleotide
cacccacttctcctataaaacc

SEQ ID NO: 2697 - DNA, 21 bp, Artificial Sequence
  Description of Artificial Sequence: Synthetic oligonucleotide
cccacttctcctataaaacca

SEQ ID NO: 2698 - DNA, 26 bp, Artificial Sequence
  Description of Artificial Sequence: Synthetic oligonucleotide
aacttaccacccacttctcctataaa

SEQ ID NO: 2699 - DNA, 25 bp, Artificial Sequence
  Description of Artificial Sequence: Synthetic oligonucleotide
ctataaaaccacaatcccacccaac

SEQ ID NO: 2700 - DNA, 23 bp, Artificial Sequence
  Description of Artificial Sequence: Synthetic oligonucleotide
cttaccacccacttctcctataa

SEQ ID NO: 2701 - DNA, 22 bp, Artificial Sequence
  Description of Artificial Sequence: Synthetic oligonucleotide
ttaccacccacttctcctataa

SEQ ID NO: 2702 - DNA, 24 bp, Artificial Sequence
  Description of Artificial Sequence: Synthetic oligonucleotide
acttaccacccacttctcctataa

SEQ ID NO: 2703 - DNA, 25 bp, Artificial Sequence
  Description of Artificial Sequence: Synthetic oligonucleotide
tataaaaccacaatcccacccaaca

SEQ ID NO: 2704 - DNA, 26 bp, Artificial Sequence
  Description of Artificial Sequence: Synthetic oligonucleotide
cctataaaaccacaatcccacccaac

SEQ ID NO: 2705 - DNA, 26 bp, Artificial Sequence
  Description of Artificial Sequence: Synthetic oligonucleotide
ctataaaaccacaatcccacccaaca

SEQ ID NO: 2706 - DNA, 27 bp, Artificial Sequence
  Description of Artificial Sequence: Synthetic oligonucleotide
tcctataaaaccacaatcccacccaac

SEQ ID NO: 2707 - DNA, 27 bp, Artificial Sequence
  Description of Artificial Sequence: Synthetic oligonucleotide
ggatatttggagaggtagatagtagaa

SEQ ID NO: 2708 - DNA, 22 bp, Artificial Sequence
  Description of Artificial Sequence: Synthetic oligonucleotide
ctcctcacaattttcatccaac

SEQ ID NO: 2709 - DNA, 31 bp, Artificial Sequence
  Description of Artificial Sequence: Synthetic oligonucleotide
aggtagatagtagaagcggatattttttcgt

SEQ ID NO: 2710 - DNA, 30 bp, Artificial Sequence
  Description of Artificial Sequence: Synthetic oligonucleotide
gatagtagaagtggatatttttttgtatgt

SEQ ID NO: 2711 - DNA, 21 bp, Artificial Sequence
  Description of Artificial Sequence: Synthetic oligonucleotide
tcctcacaattttcatccaac

SEQ ID NO: 2712 - DNA, 21 bp, Artificial Sequence
  Description of Artificial Sequence: Synthetic oligonucleotide
ctcacaattttcatccaacca

SEQ ID NO: 2713 - DNA, 21 bp, Artificial Sequence
  Description of Artificial Sequence: Synthetic oligonucleotide
cctcacaattttcatccaacc

SEQ ID NO: 2714 - DNA, 20 bp, Artificial Sequence
  Description of Artificial Sequence: Synthetic oligonucleotide
tcacaattttcatccaacca

SEQ ID NO: 2715 - DNA, 19 bp, Artificial Sequence
  Description of Artificial Sequence: Synthetic oligonucleotide
cacaattttcatccaacca

SEQ ID NO: 2716 - DNA, 28 bp, Artificial Sequence
  Description of Artificial Sequence: Synthetic oligonucleotide
ggatatttggagaggtagatagtagaag

SEQ ID NO: 2717 - DNA, 30 bp, Artificial Sequence
  Description of Artificial Sequence: Synthetic oligonucleotide
tagaagtggatatttttttgtatgtttgag

SEQ ID NO: 2718 - DNA, 30 bp, Artificial Sequence
  Description of Artificial Sequence: Synthetic oligonucleotide
gtagaagtggatatttttttgtatgtttga

SEQ ID NO: 2719 - DNA, 31 bp, Artificial Sequence
  Description of Artificial Sequence: Synthetic oligonucleotide
tagaagtggatatttttttgtatgtttgagt

SEQ ID NO: 2720 - DNA, 31 bp, Artificial Sequence
  Description of Artificial Sequence: Synthetic oligonucleotide
gtagaagtggatatttttttgtatgtttgag

SEQ ID NO: 2721 - DNA, 31 bp, Artificial Sequence
  Description of Artificial Sequence: Synthetic oligonucleotide
agtagaagtggatatttttttgtatgtttga

SEQ ID NO: 2722 - DNA, 26 bp, Artificial Sequence
  Description of Artificial Sequence: Synthetic oligonucleotide
tttcactcttattacccaaactaaaa

SEQ ID NO: 2723 - DNA, 22 bp, Artificial Sequence
  Description of Artificial Sequence: Synthetic oligonucleotide
tgatattttgtgaggttgaggt

SEQ ID NO: 2724 - DNA, 22 bp, Artificial Sequence
  Description of Artificial Sequence: Synthetic oligonucleotide
ccgcaacctccgcctccccgat

SEQ ID NO: 2725 - DNA, 33 bp, Artificial Sequence; identical to SEQ ID NO: 2107
  Description of Artificial Sequence: Synthetic oligonucleotide

SEQ ID NO: 2726 - DNA, 24 bp, Artificial Sequence
  Description of Artificial Sequence: Synthetic oligonucleotide
atattttgtgaggttgaggtaggt

SEQ ID NO: 2727 - DNA, 25 bp, Artificial Sequence
  Description of Artificial Sequence: Synthetic oligonucleotide
ttgatattttgtgaggttgaggtag

SEQ ID NO: 2728 - DNA, 25 bp, Artificial Sequence
  Description of Artificial Sequence: Synthetic oligonucleotide
gatattttgtgaggttgaggtaggt

SEQ ID NO: 2729 - DNA, 23 bp, Artificial Sequence
  Description of Artificial Sequence: Synthetic oligonucleotide
tatggtggtatatgtttgtgatg

SEQ ID NO: 2730 - DNA, 25 bp, Artificial Sequence
  Description of Artificial Sequence: Synthetic oligonucleotide
tttgatattttgtgaggttgaggta

SEQ ID NO: 2731 - DNA, 23 bp, Artificial Sequence
  Description of Artificial Sequence: Synthetic oligonucleotide
aattttgatattttgtgaggttg

SEQ ID NO: 2732 - DNA, 25 bp, Artificial Sequence
  Description of Artificial Sequence: Synthetic oligonucleotide
gaggttgaggtaggtagattatttg

SEQ ID NO: 2733 - DNA, 26 bp, Artificial Sequence
  Description of Artificial Sequence: Synthetic oligonucleotide
tgtaattttgatattttgtgaggttg

SEQ ID NO: 2734 - DNA, 24 bp, Artificial Sequence
  Description of Artificial Sequence: Synthetic oligonucleotide
taattttgatattttgtgaggttg

SEQ ID NO: 2735 - DNA, 27 bp, Artificial Sequence
  Description of Artificial Sequence: Synthetic oligonucleotide
aaaatataaaagtagttggtatggtgg

SEQ ID NO: 2736 - DNA, 25 bp, Artificial Sequence
  Description of Artificial Sequence: Synthetic oligonucleotide
gtaattttgatattttgtgaggttg

SEQ ID NO: 2737 - DNA, 26 bp, Artificial Sequence
  Description of Artificial Sequence: Synthetic oligonucleotide
aaatataaaagtagttggtatggtgg

SEQ ID NO: 2738 - DNA, 28 bp, Artificial Sequence
  Description of Artificial Sequence: Synthetic oligonucleotide
aaaaatataaaagtagttggtatggtgg

SEQ ID NO: 2739 - DNA, 24 bp, Artificial Sequence
  Description of Artificial Sequence: Synthetic oligonucleotide
aggttgaggtaggtagattatttg

SEQ ID NO: 2740 - DNA, 29 bp, Artificial Sequence
  Description of Artificial Sequence: Synthetic oligonucleotide
taaaaatataaaagtagttggtatggtgg

SEQ ID NO: 2741 - DNA, 26 bp, Artificial Sequence
  Description of Artificial Sequence: Synthetic oligonucleotide
aatataaaagtagttggtatggtggt

SEQ ID NO: 2742 - DNA, 29 bp, Artificial Sequence
  Description of Artificial Sequence: Synthetic oligonucleotide
ttaaaaatataaaagtagttggtatggtg

SEQ ID NO: 2743 - DNA, 30 bp, Artificial Sequence
  Description of Artificial Sequence: Synthetic oligonucleotide
attaaaaatataaaagtagttggtatggtg

SEQ ID NO: 2744 - DNA, 25 bp, Artificial Sequence
  Description of Artificial Sequence: Synthetic oligonucleotide
ttcactcttattacccaaactaaaa

SEQ ID NO: 2745 - DNA, 25 bp, Artificial Sequence
  Description of Artificial Sequence: Synthetic oligonucleotide
ttgtaattttgatattttgtgaggt

SEQ ID NO: 2746 - DNA, 27 bp, Artificial Sequence
  Description of Artificial Sequence: Synthetic oligonucleotide
atttcactcttattacccaaactaaaa

SEQ ID NO: 2747 - DNA, 26 bp, Artificial Sequence
  Description of Artificial Sequence: Synthetic oligonucleotide
aatttcactcttattacccaaactaa

SEQ ID NO: 2748 - DNA, 33 bp, Artificial Sequence
  Description of Artificial Sequence: Synthetic oligonucleotide
cccaaactaaaatacaataacacaatctcaact

SEQ ID NO: 2749 - DNA, 33 bp, Artificial Sequence
  Description of Artificial Sequence: Synthetic oligonucleotide
aactaaaatacaataacacaatctcaactcacc

SEQ ID NO: 2750 - DNA, 34 bp, Artificial Sequence
  Description of Artificial Sequence: Synthetic oligonucleotide
cccaaactaaaatacaataacacaatctcaactc

SEQ ID NO: 2751 - DNA, 22 bp, Artificial Sequence
  Description of Artificial Sequence: Synthetic oligonucleotide
atagtttcgagtttgacggttg

SEQ ID NO: 2752 - DNA, 22 bp, Artificial Sequence
  Description of Artificial Sequence: Synthetic oligonucleotide
aatactacttccaacgctacgc

SEQ ID NO: 2753 - DNA, 37 bp, Artificial Sequence
  Description of Artificial Sequence: Synthetic oligonucleotide
ttcggagggcgtatttttttatattagttttcgtgtt

SEQ ID NO: 2754 - DNA, 22 bp, Artificial Sequence
  Description of Artificial Sequence: Synthetic oligonucleotide
ttcgtattttggtttcgtgttt

SEQ ID NO: 2755 - DNA, 22 bp, Artificial Sequence
  Description of Artificial Sequence: Synthetic oligonucleotide
ctaaccgcgctactactcctaa

SEQ ID NO: 2756 - DNA, 30 bp, Artificial Sequence
  Description of Artificial Sequence: Synthetic oligonucleotide
ggggttttagcgtagattcgggttttggat

SEQ ID NO: 2757 - DNA, 22 bp, Artificial Sequence
  Description of Artificial Sequence: Synthetic oligonucleotide
tcgtattttggtttcgtgtttc

SEQ ID NO: 2758 - DNA, 31 bp, Artificial Sequence
  Description of Artificial Sequence: Synthetic oligonucleotide
ttttagcgtagattcgggttttggattcggt

SEQ ID NO: 2759 - DNA, 22 bp, Artificial Sequence
  Description of Artificial Sequence: Synthetic oligonucleotide
tagtattggacgtaggaaagcg

SEQ ID NO: 2760 - DNA, 22 bp, Artificial Sequence
  Description of Artificial Sequence: Synthetic oligonucleotide
taaacgaaacgataaaactccc

SEQ ID NO: 2761 - DNA, 29 bp, Artificial Sequence
  Description of Artificial Sequence: Synthetic oligonucleotide
gtcggttggggcgtaaagattgttttggg

SEQ ID NO: 2762 - DNA, 22 bp, Artificial Sequence
  Description of Artificial Sequence: Synthetic oligonucleotide
tactaaccgcgctactactcct

SEQ ID NO: 2763 - DNA, 22 bp, Artificial Sequence
  Description of Artificial Sequence: Synthetic oligonucleotide
actaaccgcgctactactccta

SEQ ID NO: 2764 - DNA, 22 bp, Artificial Sequence
  Description of Artificial Sequence: Synthetic oligonucleotide
taaccgcgctactactcctaat

SEQ ID NO: 2765 - DNA, 22 bp, Artificial Sequence
  Description of Artificial Sequence: Synthetic oligonucleotide
gcgacccgaactaatctaatct

SEQ ID NO: 2766 - DNA, 43 bp, Artificial Sequence
  Description of Artificial Sequence: Synthetic oligonucleotide
gggagttttatcgtttcgtttagaatagttagtaatgattagg

SEQ ID NO: 2767 - DNA, 21 bp, Artificial Sequence
  Description of Artificial Sequence: Synthetic oligonucleotide
tagtttcgagtttgacggttg

SEQ ID NO: 2768 - DNA, 22 bp, Artificial Sequence
  Description of Artificial Sequence: Synthetic oligonucleotide
tcgcgttattttagtagggttc

SEQ ID NO: 2769 - DNA, 21 bp, Artificial Sequence
  Description of Artificial Sequence: Synthetic oligonucleotide
cgattaaaactcgaaacgaca

SEQ ID NO: 2770 - DNA, 25 bp, Artificial Sequence
  Description of Artificial Sequence: Synthetic oligonucleotide
agaagggttgtttcgtcgcggtcgt

SEQ ID NO: 2771 - DNA, 22 bp, Artificial Sequence
  Description of Artificial Sequence: Synthetic oligonucleotide
caatactacttccaacgctacg

SEQ ID NO: 2772 - DNA, 22 bp, Artificial Sequence
  Description of Artificial Sequence: Synthetic oligonucleotide
gagcgtttgtacggtttaagat

SEQ ID NO: 2773 - DNA, 21 bp, Artificial Sequence
  Description of Artificial Sequence: Synthetic oligonucleotide
cgctaacgtcaatcgaaacta

SEQ ID NO: 2774 - DNA, 28 bp, Artificial Sequence
  Description of Artificial Sequence: Synthetic oligonucleotide
agggtttgtttcggcgtgtcgttagttt

SEQ ID NO: 2775 - DNA, 22 bp, Artificial Sequence
  Description of Artificial Sequence: Synthetic oligonucleotide
ccgcgctactactcctaataca

SEQ ID NO: 2776 - DNA, 22 bp, Artificial Sequence
  Description of Artificial Sequence: Synthetic oligonucleotide
cgtagcgttggaagtagtattg

SEQ ID NO: 2777 - DNA, 22 bp, Artificial Sequence
  Description of Artificial Sequence: Synthetic oligonucleotide
acgataaaactcccgtaaatcc

SEQ ID NO: 2778 - DNA, 29 bp, Artificial Sequence
  Description of Artificial Sequence: Synthetic oligonucleotide
gagaagtcggttggggcgtaaagattgtt

SEQ ID NO: 2779 - DNA, 23 bp, Artificial Sequence
  Description of Artificial Sequence: Synthetic oligonucleotide
tatagtttcgagtttgacggttg

SEQ ID NO: 2780 - DNA, 22 bp, Artificial Sequence
  Description of Artificial Sequence: Synthetic oligonucleotide
accgcgctactactcctaatac

SEQ ID NO: 2781 - DNA, 22 bp, Artificial Sequence
  Description of Artificial Sequence: Synthetic oligonucleotide
ttaaaactcgaaacgacaaacg

SEQ ID NO: 2782 - DNA, 23 bp, Artificial Sequence
  Description of Artificial Sequence: Synthetic oligonucleotide
aaccgcgctactactcctaatac

SEQ ID NO: 2783 - DNA, 22 bp, Artificial Sequence
  Description of Artificial Sequence: Synthetic oligonucleotide
acatattcttcgctaacgtcaa

SEQ ID NO: 2784 - DNA, 21 bp, Artificial Sequence
  Description of Artificial Sequence: Synthetic oligonucleotide
cgtattttggtttcgtgtttc

SEQ ID NO: 2785 - DNA, 21 bp, Artificial Sequence
  Description of Artificial Sequence: Synthetic oligonucleotide
tttcgtattttggtttcgtgt

SEQ ID NO: 2786 - DNA, 21 bp, Artificial Sequence
  Description of Artificial Sequence: Synthetic oligonucleotide
gtattttggtttcgtgtttcg

SEQ ID NO: 2787 - DNA, 22 bp, Artificial Sequence
  Description of Artificial Sequence: Synthetic oligonucleotide
gaaacgataaaactcccgtaaa

SEQ ID NO: 2788 - DNA, 23 bp, Artificial Sequence
  Description of Artificial Sequence: Synthetic oligonucleotide
ctaaacgaaacgataaaactccc

SEQ ID NO: 2789 - DNA, 23 bp, Artificial Sequence
  Description of Artificial Sequence: Synthetic oligonucleotide
cgttggaagtagtattggacgta

SEQ ID NO: 2790 - DNA, 22 bp, Artificial Sequence
  Description of Artificial Sequence: Synthetic oligonucleotide
cgcgctactactcctaatacaa

SEQ ID NO: 2791 - DNA, 21 bp, Artificial Sequence
  Description of Artificial Sequence: Synthetic oligonucleotide
agtattggacgtaggaaagcg

SEQ ID NO: 2792 - DNA, 21 bp, Artificial Sequence
  Description of Artificial Sequence: Synthetic oligonucleotide
gacgtaggaaagcgagaagtc

SEQ ID NO: 2793 - DNA, 22 bp, Artificial Sequence
  Description of Artificial Sequence: Synthetic oligonucleotide
atactacttccaacgctacgcc

SEQ ID NO: 2794 - DNA, 23 bp, Artificial Sequence
  Description of Artificial Sequence: Synthetic oligonucleotide
ttatagtttcgagtttgacggtt

SEQ ID NO: 2795 - DNA, 22 bp, Artificial Sequence
  Description of Artificial Sequence: Synthetic oligonucleotide
acgtccaatactacttccaacg

SEQ ID NO: 2796 - DNA, 21 bp, Artificial Sequence
  Description of Artificial Sequence: Synthetic oligonucleotide
aaacgaaacgataaaactccc

SEQ ID NO: 2797 - DNA, 22 bp, Artificial Sequence
  Description of Artificial Sequence: Synthetic oligonucleotide
agcgtttgtacggtttaagatt

SEQ ID NO: 2798 - DNA, 22 bp, Artificial Sequence
  Description of Artificial Sequence: Synthetic oligonucleotide
ggcgtagcgttggaagtagtat

SEQ ID NO: 2799 - DNA, 28 bp, Artificial Sequence
  Description of Artificial Sequence: Synthetic oligonucleotide
ggacgtaggaaagcgagaagtcggttgg

SEQ ID NO: 2800 - DNA, 22 bp, Artificial Sequence
  Description of Artificial Sequence: Synthetic oligonucleotide
catattcttcgctaacgtcaat

SEQ ID NO: 2801 - DNA, 24 bp, Artificial Sequence
  Description of Artificial Sequence: Synthetic oligonucleotide
gttatagtttcgagtttgacggtt

SEQ ID NO: 2802 - DNA, 23 bp, Artificial Sequence
  Description of Artificial Sequence: Synthetic oligonucleotide
gattaaaactcgaaacgacaaac

SEQ ID NO: 2803 - DNA, 22 bp, Artificial Sequence
  Description of Artificial Sequence: Synthetic oligonucleotide
tcgctaacgtcaatcgaaacta

SEQ ID NO: 2804 - DNA, 22 bp, Artificial Sequence
  Description of Artificial Sequence: Synthetic oligonucleotide
acgaaacgataaaactcccgta

SEQ ID NO: 2805 - DNA, 21 bp, Artificial Sequence
  Description of Artificial Sequence: Synthetic oligonucleotide
ttcgtattttggtttcgtgtt

SEQ ID NO: 2806 - DNA, 23 bp, Artificial Sequence
  Description of Artificial Sequence: Synthetic oligonucleotide
agttatagtttcgagtttgacgg

SEQ ID NO: 2807 - DNA, 24 bp, Artificial Sequence
  Description of Artificial Sequence: Synthetic oligonucleotide
tggcgggtttcggagggcgtattt

SEQ ID NO: 2808 - DNA, 21 bp, Artificial Sequence
  Description of Artificial Sequence: Synthetic oligonucleotide
gcgacccgaactaatctaatc

SEQ ID NO: 2809 - DNA, 20 bp, Artificial Sequence
  Description of Artificial Sequence: Synthetic oligonucleotide
agtttcgagtttgacggttg

SEQ ID NO: 2810 - DNA, 23 bp, Artificial Sequence
  Description of Artificial Sequence: Synthetic oligonucleotide
aaacgataaaactcccgtaaatc

SEQ ID NO: 2811 - DNA, 22 bp, Artificial Sequence
  Description of Artificial Sequence: Synthetic oligonucleotide
tatagtttcgagtttgacggtt

SEQ ID NO: 2812 - DNA, 24 bp, Artificial Sequence
  Description of Artificial Sequence: Synthetic oligonucleotide
ttctaaacgaaacgataaaactcc

SEQ ID NO: 2813 - DNA, 37 bp, Artificial Sequence
  Description of Artificial Sequence: Synthetic oligonucleotide
gtcggttggggcgtaaagattgttttgggatttacgg

SEQ ID NO: 2814 - DNA, 21 bp, Artificial Sequence
  Description of Artificial Sequence: Synthetic oligonucleotide
cgataaaactcccgtaaatcc

SEQ ID NO: 2815 - DNA, 22 bp, Artificial Sequence
  Description of Artificial Sequence: Synthetic oligonucleotide
gcgttattttagtagggttcgt

SEQ ID NO: 2816 - DNA, 22 bp, Artificial Sequence
  Description of Artificial Sequence: Synthetic oligonucleotide
cgattaaaactcgaaacgacaa

SEQ ID NO: 2817 - DNA, 21 bp, Artificial Sequence
  Description of Artificial Sequence: Synthetic oligonucleotide
gtcgcgtgttttgatatacga

SEQ ID NO: 2818 - DNA, 22 bp, Artificial Sequence
  Description of Artificial Sequence: Synthetic oligonucleotide
aataaattccaacgacacaacg

SEQ ID NO: 2819 - DNA, 24 bp, Artificial Sequence
  Description of Artificial Sequence: Synthetic oligonucleotide
agggaggcgggatcgtgaggttgt

SEQ ID NO: 2820 - DNA, 23 bp, Artificial Sequence
  Description of Artificial Sequence: Synthetic oligonucleotide
tacatattcttcgctaacgtcaa

SEQ ID NO: 2821 - DNA, 21 bp, Artificial Sequence
  Description of Artificial Sequence: Synthetic oligonucleotide
ctcgctttcctacgtccaata

SEQ ID NO: 2822 - DNA, 27 bp, Artificial Sequence
  Description of Artificial Sequence: Synthetic oligonucleotide
tttcgtgtttttgggcgtagcgttgga

SEQ ID NO: 2823 - DNA, 23 bp, Artificial Sequence
  Description of Artificial Sequence: Synthetic oligonucleotide
tctaaacgaaacgataaaactcc

SEQ ID NO: 2824 - DNA, 22 bp, Artificial Sequence
  Description of Artificial Sequence: Synthetic oligonucleotide
cgtttgtacggtttaagattga

SEQ ID NO: 2825 - DNA, 22 bp, Artificial Sequence
  Description of Artificial Sequence: Synthetic oligonucleotide
tataaaactaacgacacgccga

SEQ ID NO: 2826 - DNA, 28 bp, Artificial Sequence
  Description of Artificial Sequence: Synthetic oligonucleotide
ttcggggtaggttgaagacgttttgggg

SEQ ID NO: 2827 - DNA, 20 bp, Artificial Sequence
  Description of Artificial Sequence: Synthetic oligonucleotide
tcgctttcctacgtccaata

SEQ ID NO: 2828 - DNA, 22 bp, Artificial Sequence
  Description of Artificial Sequence: Synthetic oligonucleotide
aacgataaaactcccgtaaatc

SEQ ID NO: 2829 - DNA, 21 bp, Artificial Sequence
  Description of Artificial Sequence: Synthetic oligonucleotide
tactacttccaacgctacgcc

SEQ ID NO: 2830 - DNA, 21 bp, Artificial Sequence
  Description of Artificial Sequence: Synthetic oligonucleotide
gtattggacgtaggaaagcga

SEQ ID NO: 2831 - DNA, 21 bp, Artificial Sequence
  Description of Artificial Sequence: Synthetic oligonucleotide
gtatatcaaaacacgcgaccc

SEQ ID NO: 2832 - DNA, 23 bp, Artificial Sequence
  Description of Artificial Sequence: Synthetic oligonucleotide
gtagtattggacgtaggaaagcg

SEQ ID NO: 2833 - DNA, 20 bp, Artificial Sequence
  Description of Artificial Sequence: Synthetic oligonucleotide
cgggtttcgtattttggttt

SEQ ID NO: 2834 - DNA, 20 bp, Artificial Sequence
  Description of Artificial Sequence: Synthetic oligonucleotide
tattggacgtaggaaagcga

SEQ ID NO: 2835 - DNA, 20 bp, Artificial Sequence
  Description of Artificial Sequence: Synthetic oligonucleotide
tatatcaaaacacgcgaccc

SEQ ID NO: 2836 - DNA, 23 bp, Artificial Sequence
  Description of Artificial Sequence: Synthetic oligonucleotide
attaaaactcgaaacgacaaacg

SEQ ID NO: 2837 - DNA, 21 bp, Artificial Sequence
  Description of Artificial Sequence: Synthetic oligonucleotide
gacttctcgctttcctacgtc

SEQ ID NO: 2838 - DNA, 20 bp, Artificial Sequence
  Description of Artificial Sequence: Synthetic oligonucleotide
tcgcgtgttttgatatacga

SEQ ID NO: 2839 - DNA, 21 bp, Artificial Sequence
  Description of Artificial Sequence: Synthetic oligonucleotide
tcgtatatcaaaacacgcgac

SEQ ID NO: 2840 - DNA, 21 bp, Artificial Sequence
  Description of Artificial Sequence: Synthetic oligonucleotide
gcgtagcgttggaagtagtat

SEQ ID NO: 2841 - DNA, 23 bp, Artificial Sequence
  Description of Artificial Sequence: Synthetic oligonucleotide
tacgtccaatactacttccaacg

SEQ ID NO: 2842 - DNA, 21 bp, Artificial Sequence
  Description of Artificial Sequence: Synthetic oligonucleotide
ataaattccaacgacacaacg

SEQ ID NO: 2843 - DNA, 21 bp, Artificial Sequence
  Description of Artificial Sequence: Synthetic oligonucleotide
tattggacgtaggaaagcgag

SEQ ID NO: 2844 - DNA, 21 bp, Artificial Sequence
  Description of Artificial Sequence: Synthetic oligonucleotide
accgacttctcgctttcctac

SEQ ID NO: 2845 - DNA, 21 bp, Artificial Sequence
  Description of Artificial Sequence: Synthetic oligonucleotide
acttctcgctttcctacgtcc

SEQ ID NO: 2846 - DNA, 21 bp, Artificial Sequence
  Description of Artificial Sequence: Synthetic oligonucleotide
cgagaagcgttcgttagtagt

SEQ ID NO: 2847 - DNA, 22 bp, Artificial Sequence
  Description of Artificial Sequence: Synthetic oligonucleotide
aaacccgaatctacgctaaaac

SEQ ID NO: 2848 - DNA, 24 bp, Artificial Sequence
  Description of Artificial Sequence: Synthetic oligonucleotide
agaggagcgcgcgggtttcgtatt

SEQ ID NO: 2849 - DNA, 24 bp, Artificial Sequence
  Description of Artificial Sequence: Synthetic oligonucleotide
atacatattcttcgctaacgtcaa

SEQ ID NO: 2850 - DNA, 21 bp, Artificial Sequence
  Description of Artificial Sequence: Synthetic oligonucleotide
gggtcgcgtgttttgatatac

SEQ ID NO: 2851 - DNA, 21 bp, Artificial Sequence
  Description of Artificial Sequence: Synthetic oligonucleotide
cgagcgtttgtacggtttaag

SEQ ID NO: 2852 - DNA, 22 bp, Artificial Sequence
  Description of Artificial Sequence: Synthetic oligonucleotide
cgctaacgtcaatcgaaactat

SEQ ID NO: 2853 - DNA, 24 bp, Artificial Sequence
  Description of Artificial Sequence: Synthetic oligonucleotide
tagttatagtttcgagtttgacgg

SEQ ID NO: 2854 - DNA, 19 bp, Artificial Sequence
  Description of Artificial Sequence: Synthetic oligonucleotide
ttctcgctttcctacgtcc

SEQ ID NO: 2855 - DNA, 21 bp, Artificial Sequence
  Description of Artificial Sequence: Synthetic oligonucleotide
gcgagaagcgttcgttagtag

SEQ ID NO: 2856 - DNA, 21 bp, Artificial Sequence
  Description of Artificial Sequence: Synthetic oligonucleotide
aaacccgaatctacgctaaaa

SEQ ID NO: 2857 - DNA, 35 bp, Artificial Sequence
  Description of Artificial Sequence: Synthetic oligonucleotide
aagaggagcgcgcgggtttcgtattttggtttcgt

SEQ ID NO: 2858 - DNA, 21 bp, Artificial Sequence
  Description of Artificial Sequence: Synthetic oligonucleotide
aaaacccgaatctacgctaaa

SEQ ID NO: 2859 - DNA, 21 bp, Artificial Sequence
  Description of Artificial Sequence: Synthetic oligonucleotide
tattttggtttcgtgtttcgg

SEQ ID NO: 2860 - DNA, 20 bp, Artificial Sequence
  Description of Artificial Sequence: Synthetic oligonucleotide
ccgacttctcgctttcctac

SEQ ID NO: 2861 - DNA, 20 bp, Artificial Sequence
  Description of Artificial Sequence: Synthetic oligonucleotide
cttctcgctttcctacgtcc

SEQ ID NO: 2862 - DNA, 20 bp, Artificial Sequence
  Description of Artificial Sequence: Synthetic oligonucleotide
tcgtatatcaaaacacgcga

SEQ ID NO: 2863 - DNA, 21 bp, Artificial Sequence
  Description of Artificial Sequence: Synthetic oligonucleotide
cgaaacgataaaactcccgta

SEQ ID NO: 2864 - DNA, 21 bp, Artificial Sequence
  Description of Artificial Sequence: Synthetic oligonucleotide
ttcgtatatcaaaacacgcga

SEQ ID NO: 2865 - DNA, 21 bp, Artificial Sequence
  Description of Artificial Sequence: Synthetic oligonucleotide
cgtccaatactacttccaacg

SEQ ID NO: 2866 - DNA, 21 bp, Artificial Sequence
  Description of Artificial Sequence: Synthetic oligonucleotide
atagtttcgagtttgacggtt

SEQ ID NO: 2867 - DNA, 24 bp, Artificial Sequence
  Description of Artificial Sequence: Synthetic oligonucleotide
cgttggaagtagtattggacgtag

SEQ ID NO: 2868 - DNA, 21 bp, Artificial Sequence
  Description of Artificial Sequence: Synthetic oligonucleotide
ataaaactaacgacacgccga

SEQ ID NO: 2869 - DNA, 20 bp, Artificial Sequence
  Description of Artificial Sequence: Synthetic oligonucleotide
cgtatatcaaaacacgcgac

SEQ ID NO: 2870 - DNA, 21 bp, Artificial Sequence
  Description of Artificial Sequence: Synthetic oligonucleotide
ggacgtaggaaagcgagaagt

SEQ ID NO: 2871 - DNA, 21 bp, Artificial Sequence
  Description of Artificial Sequence: Synthetic oligonucleotide
gtaggaaagcgagaagtcggt

SEQ ID NO: 2872 - DNA, 20 bp, Artificial Sequence
  Description of Artificial Sequence: Synthetic oligonucleotide
actacttccaacgctacgcc

SEQ ID NO: 2873 - DNA, 23 bp, Artificial Sequence
  Description of Artificial Sequence: Synthetic oligonucleotide
catattcttcgctaacgtcaatc

SEQ ID NO: 2874 - DNA, 25 bp, Artificial Sequence
  Description of Artificial Sequence: Synthetic oligonucleotide
attctaaacgaaacgataaaactcc

SEQ ID NO: 2875 - DNA, 19 bp, Artificial Sequence
  Description of Artificial Sequence: Synthetic oligonucleotide
ctacttccaacgctacgcc

SEQ ID NO: 2876 - DNA, 20 bp, Artificial Sequence
  Description of Artificial Sequence: Synthetic oligonucleotide
taggaaagcgagaagtcggt

SEQ ID NO: 2877 - DNA, 19 bp, Artificial Sequence
  Description of Artificial Sequence: Synthetic oligonucleotide
atatcaaaacacgcgaccc

SEQ ID NO: 2878 - DNA, 25 bp, Artificial Sequence
  Description of Artificial Sequence: Synthetic oligonucleotide
atagttatagtttcgagtttgacgg

SEQ ID NO: 2879 - DNA, 23 bp, Artificial Sequence
  Description of Artificial Sequence: Synthetic oligonucleotide
atataaaactaacgacacgccga

SEQ ID NO: 2880 - DNA, 21 bp, Artificial Sequence
  Description of Artificial Sequence: Synthetic oligonucleotide
aacccgaatctacgctaaaac

SEQ ID NO: 2881 - DNA, 21 bp, Artificial Sequence
  Description of Artificial Sequence: Synthetic oligonucleotide
gagcgtttgtacggtttaaga

SEQ ID NO: 2882 - DNA, 23 bp, Artificial Sequence
  Description of Artificial Sequence: Synthetic oligonucleotide
gctaacgtcaatcgaaactatcc

SEQ ID NO: 2883 - DNA, 21 bp, Artificial Sequence
  Description of Artificial Sequence: Synthetic oligonucleotide
catattcttcgctaacgtcaa

SEQ ID NO: 2884 - DNA, 21 bp, Artificial Sequence
  Description of Artificial Sequence: Synthetic oligonucleotide
tcgctttcctacgtccaatac

SEQ ID NO: 2885 - DNA, 19 bp, Artificial Sequence
  Description of Artificial Sequence: Synthetic oligonucleotide
attggacgtaggaaagcga

SEQ ID NO: 2886 - DNA, 19 bp, Artificial Sequence
  Description of Artificial Sequence: Synthetic oligonucleotide
ggcgtagcgttggaagtag

SEQ ID NO: 2887 - DNA, 23 bp, Artificial Sequence
  Description of Artificial Sequence: Synthetic oligonucleotide
cgctttcctacgtccaatactac

SEQ ID NO: 2888 - DNA, 23 bp, Artificial Sequence
  Description of Artificial Sequence: Synthetic oligonucleotide
ctaacgtcaatcgaaactatcct

SEQ ID NO: 2889 - DNA, 23 bp, Artificial Sequence
  Description of Artificial Sequence: Synthetic oligonucleotide
ctaaccgcgctactactcctaat

SEQ ID NO: 2890 - DNA, 23 bp, Artificial Sequence
  Description of Artificial Sequence: Synthetic oligonucleotide
cgtcaatcgaaactatcctaaca

SEQ ID NO: 2891 - DNA, 22 bp, Artificial Sequence
  Description of Artificial Sequence: Synthetic oligonucleotide
taacgtcaatcgaaactatcct

SEQ ID NO: 2892 - DNA, 21 bp, Artificial Sequence
  Description of Artificial Sequence: Synthetic oligonucleotide
gcgtttgtacggtttaagatt

SEQ ID NO: 2893 - DNA, 21 bp, Artificial Sequence
  Description of Artificial Sequence: Synthetic oligonucleotide
cgcgttattttagtagggttc

SEQ ID NO: 2894 - DNA, 21 bp, Artificial Sequence
  Description of Artificial Sequence: Synthetic oligonucleotide
taaaactcgaaacgacaaacg

SEQ ID NO: 2895 - DNA, 21 bp, Artificial Sequence
  Description of Artificial Sequence: Synthetic oligonucleotide
tcgcgttattttagtagggtt

SEQ ID NO: 2896 - DNA, 21 bp, Artificial Sequence
  Description of Artificial Sequence: Synthetic oligonucleotide
gcgttattttagtagggttcg

SEQ ID NO: 2897 - DNA, 20 bp, Artificial Sequence
  Description of Artificial Sequence: Synthetic oligonucleotide
acgcgacccgaactaatcta

SEQ ID NO: 2898 - DNA, 21 bp, Artificial Sequence
  Description of Artificial Sequence: Synthetic oligonucleotide
cgtttcgtttgttttatggtg

SEQ ID NO: 2899 - DNA, 20 bp, Artificial Sequence
  Description of Artificial Sequence: Synthetic oligonucleotide
acgacgcctacaactatccc

SEQ ID NO: 2900 - DNA, 34 bp, Artificial Sequence
  Description of Artificial Sequence: Synthetic oligonucleotide
tggatatataggggtagcgtagggtgaggtgcgt

SEQ ID NO: 2901 - DNA, 22 bp, Artificial Sequence
  Description of Artificial Sequence: Synthetic oligonucleotide
ctaaacgaaacgataaaactcc

SEQ ID NO: 2902 - DNA, 19 bp, Artificial Sequence
  Description of Artificial Sequence: Synthetic oligonucleotide
actaacgacacgccgaaac

SEQ ID NO: 2903 - DNA, 19 bp, Artificial Sequence
  Description of Artificial Sequence: Synthetic oligonucleotide
acgctactaaccgcgctac

SEQ ID NO: 2904 - DNA, 20 bp, Artificial Sequence
  Description of Artificial Sequence: Synthetic oligonucleotide
cggcgtgtcgttagttttat

SEQ ID NO: 2905 - DNA, 20 bp, Artificial Sequence
  Description of Artificial Sequence: Synthetic oligonucleotide
caaccgtcaaactcgaaact

SEQ ID NO: 2906 - DNA, 34 bp, Artificial Sequence
  Description of Artificial Sequence: Synthetic oligonucleotide
agtgttaggatagtttcgattgacgttagcgaag

SEQ ID NO: 2907 - DNA, 21 bp, Artificial Sequence
  Description of Artificial Sequence: Synthetic oligonucleotide
cgacccgaactaatctaatct

SEQ ID NO: 2908 - DNA, 30 bp, Artificial Sequence
  Description of Artificial Sequence: Synthetic oligonucleotide
ttagttttcgtgtttttgggcgtagcgttg

SEQ ID NO: 2909 - DNA, 19 bp, Artificial Sequence
  Description of Artificial Sequence: Synthetic oligonucleotide
cgacgcctacaactatccc

SEQ ID NO: 2910 - DNA, 36 bp, Artificial Sequence
  Description of Artificial Sequence: Synthetic oligonucleotide
gtcggttttggatatataggggtagcgtagggtgag

SEQ ID NO: 2911 - DNA, 19 bp, Artificial Sequence
  Description of Artificial Sequence: Synthetic oligonucleotide
aacgctactaaccgcgcta

SEQ ID NO: 2912 - DNA, 22 bp, Artificial Sequence
  Description of Artificial Sequence: Synthetic oligonucleotide
gcggacgttttgagttatttat

SEQ ID NO: 2913 - DNA, 25 bp, Artificial Sequence
  Description of Artificial Sequence: Synthetic oligonucleotide
ggttgtcggcgagcgtttgtacggt

SEQ ID NO: 2914 - DNA, 19 bp, Artificial Sequence
  Description of Artificial Sequence: Synthetic oligonucleotide
cgcgacccgaactaatcta

SEQ ID NO: 2915 - DNA, 21 bp, Artificial Sequence
  Description of Artificial Sequence: Synthetic oligonucleotide
agcgtttgtacggtttaagat

SEQ ID NO: 2916 - DNA, 20 bp, Artificial Sequence
  Description of Artificial Sequence: Synthetic oligonucleotide
taaaactaacgacacgccga

SEQ ID NO: 2917 - DNA, 19 bp, Artificial Sequence
  Description of Artificial Sequence: Synthetic oligonucleotide
gaaagcgagaagtcggttg

SEQ ID NO: 2918 - DNA, 23 bp, Artificial Sequence
  Description of Artificial Sequence: Synthetic oligonucleotide
cgcgctactactcctaatacaac

SEQ ID NO: 2919 - DNA, 21 bp, Artificial Sequence
  Description of Artificial Sequence: Synthetic oligonucleotide
gagtcgaatatgatgcggttt

SEQ ID NO: 2920 - DNA, 21 bp, Artificial Sequence
  Description of Artificial Sequence: Synthetic oligonucleotide
cgacgaaacaacccttctcta

SEQ ID NO: 2921 - DNA, 30 bp, Artificial Sequence
  Description of Artificial Sequence: Synthetic oligonucleotide
ttgcgttcgcgttattttagtagggttcgt

SEQ ID NO: 2922 - DNA, 18 bp, Artificial Sequence
  Description of Artificial Sequence: Synthetic oligonucleotide
ttcgagtttgacggttgg

SEQ ID NO: 2923 - DNA, 20 bp, Artificial Sequence
  Description of Artificial Sequence: Synthetic oligonucleotide
acgtaggaaagcgagaagtc

SEQ ID NO: 2924 - DNA, 18 bp, Artificial Sequence
  Description of Artificial Sequence: Synthetic oligonucleotide
tatcaaaacacgcgaccc

SEQ ID NO: 2925 - DNA, 24 bp, Artificial Sequence
  Description of Artificial Sequence: Synthetic oligonucleotide
aaagcgagaagtcggttggggcgt

SEQ ID NO: 2926 - DNA, 20 bp, Artificial Sequence
  Description of Artificial Sequence: Synthetic oligonucleotide
caaaacccgaatctacgcta

SEQ ID NO: 2927 - DNA, 21 bp, Artificial Sequence
  Description of Artificial Sequence: Synthetic oligonucleotide
aaccgcgctactactcctaat

SEQ ID NO: 2928 - DNA, 20 bp, Artificial Sequence
  Description of Artificial Sequence: Synthetic oligonucleotide
taaattccaacgacacaacg

SEQ ID NO: 2929 - DNA, 18 bp, Artificial Sequence
  Description of Artificial Sequence: Synthetic oligonucleotide
tttggtttcgtgtttcgg

SEQ ID NO: 2930 - DNA, 21 bp, Artificial Sequence
  Description of Artificial Sequence: Synthetic oligonucleotide
caaaacccgaatctacgctaa

SEQ ID NO: 2931 - DNA, 19 bp, Artificial Sequence
  Description of Artificial Sequence: Synthetic oligonucleotide
gtttcgagtttgacggttg

SEQ ID NO: 2932 - DNA, 19 bp, Artificial Sequence
  Description of Artificial Sequence: Synthetic oligonucleotide
aacgcaacgctactaaccg

SEQ ID NO: 2933 - DNA, 20 bp, Artificial Sequence
  Description of Artificial Sequence: Synthetic oligonucleotide
aacgaaacgataaaactccc

SEQ ID NO: 2934 - DNA, 23 bp, Artificial Sequence
  Description of Artificial Sequence: Synthetic oligonucleotide
ccgcgctactactcctaatacaa

SEQ ID NO: 2935 - DNA, 20 bp, Artificial Sequence
  Description of Artificial Sequence: Synthetic oligonucleotide
aacgctactaaccgcgctac

SEQ ID NO: 2936 - DNA, 18 bp, Artificial Sequence
  Description of Artificial Sequence: Synthetic oligonucleotide
aactaacgacacgccgaa

SEQ ID NO: 2937 - DNA, 18 bp, Artificial Sequence
  Description of Artificial Sequence: Synthetic oligonucleotide
ctaacgacacgccgaaac

SEQ ID NO: 2938 - DNA, 18 bp, Artificial Sequence
  Description of Artificial Sequence: Synthetic oligonucleotide
aaactaacgacacgccga

SEQ ID NO: 2939 - DNA, 18 bp, Artificial Sequence
  Description of Artificial Sequence: Synthetic oligonucleotide
ttcggagggcgtattttt

SEQ ID NO: 2940 - DNA, 42 bp, Artificial Sequence
  Description of Artificial Sequence: Synthetic oligonucleotide
agcgttggaagtagtattggacgtaggaaagcgagaagtcgg

SEQ ID NO: 2941 - DNA, 22 bp, Artificial Sequence
  Description of Artificial Sequence: Synthetic oligonucleotide
actaaacgaacgctctaaacca

SEQ ID NO: 2942 - DNA, 22 bp, Artificial Sequence
  Description of Artificial Sequence: Synthetic oligonucleotide
atacgtcgggatagattttgtg

SEQ ID NO: 2943 - DNA, 33 bp, Artificial Sequence
  Description of Artificial Sequence: Synthetic oligonucleotide
aggcgtttttagtttgtttcgagggatagagat

SEQ ID NO: 2944 - DNA, 22 bp, Artificial Sequence
  Description of Artificial Sequence: Synthetic oligonucleotide
taaacgaacgctctaaaccact

SEQ ID NO: 2945 - DNA, 22 bp, Artificial Sequence
  Description of Artificial Sequence: Synthetic oligonucleotide
tacgtcgggatagattttgtgt

SEQ ID NO: 2946 - DNA, 22 bp, Artificial Sequence
  Description of Artificial Sequence: Synthetic oligonucleotide
ctaaacgaacgctctaaaccac

SEQ ID NO: 2947 - DNA, 22 bp, Artificial Sequence
  Description of Artificial Sequence: Synthetic oligonucleotide
gatacgtcgggatagattttgt

SEQ ID NO: 2948 - DNA, 21 bp, Artificial Sequence
  Description of Artificial Sequence: Synthetic oligonucleotide
aaacgaacgctctaaaccact

SEQ ID NO: 2949 - DNA, 21 bp, Artificial Sequence
  Description of Artificial Sequence: Synthetic oligonucleotide
cgatacgtcgggatagatttt

SEQ ID NO: 2950 - DNA, 22 bp, Artificial Sequence
  Description of Artificial Sequence: Synthetic oligonucleotide
aacaactccgactaacgtcaac

SEQ ID NO: 2951 - DNA, 22 bp, Artificial Sequence
  Description of Artificial Sequence: Synthetic oligonucleotide
ttacgtttaggggtacgaaggt

SEQ ID NO: 2952 - DNA, 37 bp, Artificial Sequence
  Description of Artificial Sequence: Synthetic oligonucleotide
tgcgtttttcggggttcgttagtcgttagattcgaag

SEQ ID NO: 2953 - DNA, 21 bp, Artificial Sequence
  Description of Artificial Sequence: Synthetic oligonucleotide
acgtcgggatagattttgtgt

SEQ ID NO: 2954 - DNA, 21 bp, Artificial Sequence
  Description of Artificial Sequence: Synthetic oligonucleotide
tacgtttaggggtacgaaggt

SEQ ID NO: 2955 - DNA, 22 bp, Artificial Sequence
  Description of Artificial Sequence: Synthetic oligonucleotide
aactaaacgaacgctctaaacc

SEQ ID NO: 2956 - DNA, 21 bp, Artificial Sequence
  Description of Artificial Sequence: Synthetic oligonucleotide
ctaaacgaacgctctaaacca

SEQ ID NO: 2957 - DNA, 22 bp, Artificial Sequence
  Description of Artificial Sequence: Synthetic oligonucleotide
aaacaactccgactaacgtcaa

SEQ ID NO: 2958 - DNA, 22 bp, Artificial Sequence
  Description of Artificial Sequence: Synthetic oligonucleotide
gttacgtttaggggtacgaagg

SEQ ID NO: 2959 - DNA, 22 bp, Artificial Sequence
  Description of Artificial Sequence: Synthetic oligonucleotide
tacgtttaggggtacgaaggtt

SEQ ID NO: 2960 - DNA, 21 bp, Artificial Sequence
  Description of Artificial Sequence: Synthetic oligonucleotide
aacgaacgctctaaaccactc

SEQ ID NO: 2961 - DNA, 21 bp, Artificial Sequence
  Description of Artificial Sequence: Synthetic oligonucleotide
cgtcgggatagattttgtgtt

SEQ ID NO: 2962 - DNA, 22 bp, Artificial Sequence
  Description of Artificial Sequence: Synthetic oligonucleotide
cacaaaatctatcccgacgtat

SEQ ID NO: 2963 - DNA, 20 bp, Artificial Sequence
  Description of Artificial Sequence: Synthetic oligonucleotide
gtttttcggggttcgttagt

SEQ ID NO: 2964 - DNA, 30 bp, Artificial Sequence
  Description of Artificial Sequence: Synthetic oligonucleotide
ttcgttgacgttagtcggagttgttttggt

SEQ ID NO: 2965 - DNA, 23 bp, Artificial Sequence
  Description of Artificial Sequence: Synthetic oligonucleotide
aacgtcaacgaaaaacatacact

SEQ ID NO: 2966 - DNA, 23 bp, Artificial Sequence
  Description of Artificial Sequence: Synthetic oligonucleotide
aactaaacgaacgctctaaacca

SEQ ID NO: 2967 - DNA, 21 bp, Artificial Sequence
  Description of Artificial Sequence: Synthetic oligonucleotide
cgactaacgtcaacgaaaaac

SEQ ID NO: 2968 - DNA, 21 bp, Artificial Sequence
  Description of Artificial Sequence: Synthetic oligonucleotide
aacaactccgactaacgtcaa

SEQ ID NO: 2969 - DNA, 22 bp, Artificial Sequence
  Description of Artificial Sequence: Synthetic oligonucleotide
acgtcaacgaaaaacatacact

SEQ ID NO: 2970 - DNA, 20 bp, Artificial Sequence
  Description of Artificial Sequence: Synthetic oligonucleotide
cgtcgggatagattttgtgt

SEQ ID NO: 2971 - DNA, 22 bp, Artificial Sequence
  Description of Artificial Sequence: Synthetic oligonucleotide
acacaaaatctatcccgacgta

SEQ ID NO: 2972 - DNA, 20 bp, Artificial Sequence
  Description of Artificial Sequence: Synthetic oligonucleotide
acgtttaggggtacgaaggt

SEQ ID NO: 2973 - DNA, 22 bp, Artificial Sequence
  Description of Artificial Sequence: Synthetic oligonucleotide
cgttacgtttaggggtacgaag

SEQ ID NO: 2974 - DNA, 20 bp, Artificial Sequence
  Description of Artificial Sequence: Synthetic oligonucleotide
cgtttaggggtacgaaggtt

SEQ ID NO: 2975 - DNA, 23 bp, Artificial Sequence
  Description of Artificial Sequence: Synthetic oligonucleotide
cgtcaacgaaaaacatacactaa

SEQ ID NO: 2976 - DNA, 23 bp, Artificial Sequence
  Description of Artificial Sequence: Synthetic oligonucleotide
ctaacgtcaacgaaaaacataca

SEQ ID NO: 2977 - DNA, 22 bp, Artificial Sequence
  Description of Artificial Sequence: Synthetic oligonucleotide
acaaaatctatcccgacgtatc

SEQ ID NO: 2978 - DNA, 22 bp, Artificial Sequence
  Description of Artificial Sequence: Synthetic oligonucleotide
gactaacgtcaacgaaaaacat

SEQ ID NO: 2979 - DNA, 21 bp, Artificial Sequence
  Description of Artificial Sequence: Synthetic oligonucleotide
acgaacgctctaaaccactca

SEQ ID NO: 2980 - DNA, 22 bp, Artificial Sequence
  Description of Artificial Sequence: Synthetic oligonucleotide
taacgtcaacgaaaaacataca

SEQ ID NO: 2981 - DNA, 21 bp, Artificial Sequence
  Description of Artificial Sequence: Synthetic oligonucleotide
acgcaaactcgaatcctaaac

SEQ ID NO: 2982 - DNA, 21 bp, Artificial Sequence
  Description of Artificial Sequence: Synthetic oligonucleotide
gtcggcggtattatgaggtag

SEQ ID NO: 2983 - DNA, 24 bp, Artificial Sequence
  Description of Artificial Sequence: Synthetic oligonucleotide
gggacgtagcgttgttggtcgcgt

SEQ ID NO: 2984 - DNA, 20 bp, Artificial Sequence
  Description of Artificial Sequence: Synthetic oligonucleotide
cgcctcgaaactcctctaac

SEQ ID NO: 2985 - DNA, 22 bp, Artificial Sequence
  Description of Artificial Sequence: Synthetic oligonucleotide
ttaggcgtattttattttgcgt

SEQ ID NO: 2986 - DNA, 29 bp, Artificial Sequence
  Description of Artificial Sequence: Synthetic oligonucleotide
tgtgtttagggtcggcggtattatgaggt

SEQ ID NO: 2987 - DNA, 20 bp, Artificial Sequence
  Description of Artificial Sequence: Synthetic oligonucleotide
tttttcggggttcgttagtc

SEQ ID NO: 2988 - DNA, 20 bp, Artificial Sequence
  Description of Artificial Sequence: Synthetic oligonucleotide
cgaacgctctaaaccactca

SEQ ID NO: 2989 - DNA, 24 bp, Artificial Sequence
  Description of Artificial Sequence: Synthetic oligonucleotide
actaacgtcaacgaaaaacataca

SEQ ID NO: 2990 - DNA, 22 bp, Artificial Sequence
  Description of Artificial Sequence: Synthetic oligonucleotide
aaaactaaacgaacgctctaaa

SEQ ID NO: 2991 - DNA, 21 bp, Artificial Sequence
  Description of Artificial Sequence: Synthetic oligonucleotide
acgtttaggggtacgaaggtt

SEQ ID NO: 2992 - DNA, 21 bp, Artificial Sequence
  Description of Artificial Sequence: Synthetic oligonucleotide
acaactccgactaacgtcaac

SEQ ID NO: 2993 - DNA, 20 bp, Artificial Sequence
  Description of Artificial Sequence: Synthetic oligonucleotide
gcgatacgtcgggatagatt

SEQ ID NO: 2994 - DNA, 19 bp, Artificial Sequence
  Description of Artificial Sequence: Synthetic oligonucleotide
cgcctcgaaactcctctaa

SEQ ID NO: 2995 - DNA, 22 bp, Artificial Sequence
  Description of Artificial Sequence: Synthetic oligonucleotide
taggcgtattttattttgcgtt

SEQ ID NO: 2996 - DNA, 21 bp, Artificial Sequence
  Description of Artificial Sequence: Synthetic oligonucleotide
atataaggttggcgatacgtc

SEQ ID NO: 2997 - DNA, 22 bp, Artificial Sequence
  Description of Artificial Sequence: Synthetic oligonucleotide
aacgcaaactcgaatcctaaac

SEQ ID NO: 2998 - DNA, 23 bp, Artificial Sequence
  Description of Artificial Sequence: Synthetic oligonucleotide
atacgtcgggatagattttgtgt

SEQ ID NO: 2999 - DNA, 20 bp, Artificial Sequence
  Description of Artificial Sequence: Synthetic oligonucleotide
actccgactaacgtcaacga

SEQ ID NO: 3000 - DNA, 19 bp, Artificial Sequence
  Description of Artificial Sequence: Synthetic oligonucleotide
ttttcggggttcgttagtc

SEQ ID NO: 3001 - DNA, 20 bp, Artificial Sequence
  Description of Artificial Sequence: Synthetic oligonucleotide
acgaacgctctaaaccactc

SEQ ID NO: 3002 - DNA, 21 bp, Artificial Sequence
  Description of Artificial Sequence: Synthetic oligonucleotide
cgaacgctctaaaccactcac

SEQ ID NO: 3003 - DNA, 20 bp, Artificial Sequence
  Description of Artificial Sequence: Synthetic oligonucleotide
tcggcggtattatgaggtag

SEQ ID NO: 3004 - DNA, 21 bp, Artificial Sequence
  Description of Artificial Sequence: Synthetic oligonucleotide
ccaaaacaactccgactaacg

SEQ ID NO: 3005 - DNA, 19 bp, Artificial Sequence
  Description of Artificial Sequence: Synthetic oligonucleotide
cggggttcgttagtcgtta

SEQ ID NO: 3006 - DNA, 21 bp, Artificial Sequence
  Description of Artificial Sequence: Synthetic oligonucleotide
aactccgactaacgtcaacga

SEQ ID NO: 3007 - DNA, 20 bp, Artificial Sequence
  Description of Artificial Sequence: Synthetic oligonucleotide
ccgactaacgtcaacgaaaa

SEQ ID NO: 3008 - DNA, 20 bp, Artificial Sequence
  Description of Artificial Sequence: Synthetic oligonucleotide
ctccgactaacgtcaacgaa

SEQ ID NO: 3009 - DNA, 25 bp, Artificial Sequence
  Description of Artificial Sequence: Synthetic oligonucleotide
ggacgtagcgttgttggtcgcgttg

SEQ ID NO: 3010 - DNA, 21 bp, Artificial Sequence
  Description of Artificial Sequence: Synthetic oligonucleotide
ctaattccgtaccccgaaact

SEQ ID NO: 3011 - DNA, 22 bp, Artificial Sequence
  Description of Artificial Sequence: Synthetic oligonucleotide
cgcgttgttgtttttggtatag

SEQ ID NO: 3012 - DNA, 30 bp, Artificial Sequence
  Description of Artificial Sequence: Synthetic oligonucleotide
ggcggtcgggtttaggattcgagtttgcgt

SEQ ID NO: 3013 - DNA, 20 bp, Artificial Sequence
  Description of Artificial Sequence: Synthetic oligonucleotide
taattccgtaccccgaaact

SEQ ID NO: 3014 - DNA, 20 bp, Artificial Sequence
  Description of Artificial Sequence: Synthetic oligonucleotide
aacgcaaactcgaatcctaa

SEQ ID NO: 3015 - DNA, 26 bp, Artificial Sequence
  Description of Artificial Sequence: Synthetic oligonucleotide
gttagaggagtttcgaggcggtcggg

SEQ ID NO: 3016 - DNA, 20 bp, Artificial Sequence
  Description of Artificial Sequence: Synthetic oligonucleotide
cgcaaactcgaatcctaaac

SEQ ID NO: 3017 - DNA, 19 bp, Artificial Sequence
  Description of Artificial Sequence: Synthetic oligonucleotide
gaccaacaacgctacgtcc

SEQ ID NO: 3018 - DNA, 19 bp, Artificial Sequence
  Description of Artificial Sequence: Synthetic oligonucleotide
tccgactaacgtcaacgaa

SEQ ID NO: 3019 - DNA, 21 bp, Artificial Sequence
  Description of Artificial Sequence: Synthetic oligonucleotide
aggcgtattttattttgcgtt

SEQ ID NO: 3020 - DNA, 20 bp, Artificial Sequence
  Description of Artificial Sequence: Synthetic oligonucleotide
aactcgaatcctaaacccga

SEQ ID NO: 3021 - DNA, 19 bp, Artificial Sequence
  Description of Artificial Sequence: Synthetic oligonucleotide
tttttcggggttcgttagt

SEQ ID NO: 3022 - DNA, 21 bp, Artificial Sequence
  Description of Artificial Sequence: Synthetic oligonucleotide
cctcgaaacaaactaaaaacg

SEQ ID NO: 3023 - DNA, 20 bp, Artificial Sequence
  Description of Artificial Sequence: Synthetic oligonucleotide
cgttgacgttagtcggagtt

SEQ ID NO: 3024 - DNA, 30 bp, Artificial Sequence
  Description of Artificial Sequence: Synthetic oligonucleotide
aaggttggcgatacgtcgggatagattttg

SEQ ID NO: 3025 - DNA, 21 bp, Artificial Sequence
  Description of Artificial Sequence: Synthetic oligonucleotide
cgaaacaaactaaaaacgcct

SEQ ID NO: 3026 - DNA, 20 bp, Artificial Sequence
  Description of Artificial Sequence: Synthetic oligonucleotide
ttcgttgacgttagtcggag

SEQ ID NO: 3027 - DNA, 21 bp, Artificial Sequence
  Description of Artificial Sequence: Synthetic oligonucleotide
gttgacgttagtcggagttgt

SEQ ID NO: 3028 - DNA, 22 bp, Artificial Sequence
  Description of Artificial Sequence: Synthetic oligonucleotide
ggtattataggacggtcggttt

SEQ ID NO: 3029 - DNA, 22 bp, Artificial Sequence
  Description of Artificial Sequence: Synthetic oligonucleotide
accgaaataacaatcatcgaat

SEQ ID NO: 3030 - DNA, 37 bp, Artificial Sequence
  Description of Artificial Sequence: Synthetic oligonucleotide
ggacggtattattatatagtcgggttttcgtagtgtt

SEQ ID NO: 3031 - DNA, 23 bp, Artificial Sequence
  Description of Artificial Sequence: Synthetic oligonucleotide
ccgaaataacaatcatcgaatta

SEQ ID NO: 3032 - DNA, 22 bp, Artificial Sequence
  Description of Artificial Sequence: Synthetic oligonucleotide
ttataggacggtcggtttttat

SEQ ID NO: 3033 - DNA, 22 bp, Artificial Sequence
  Description of Artificial Sequence: Synthetic oligonucleotide
aattcgatgattgttatttcgg

SEQ ID NO: 3034 - DNA, 21 bp, Artificial Sequence
  Description of Artificial Sequence: Synthetic oligonucleotide
gataaaaacgccgtcctacac

SEQ ID NO: 3035 - DNA, 24 bp, Artificial Sequence
  Description of Artificial Sequence: Synthetic oligonucleotide
aggtggcgtttggtaggcgacgtt

SEQ ID NO: 3036 - DNA, 22 bp, Artificial Sequence
  Description of Artificial Sequence: Synthetic oligonucleotide
agtggtattataggacggtcgg

SEQ ID NO: 3037 - DNA, 21 bp, Artificial Sequence
  Description of Artificial Sequence: Synthetic oligonucleotide
gtggtattataggacggtcgg

SEQ ID NO: 3038 - DNA, 22 bp, Artificial Sequence
  Description of Artificial Sequence: Synthetic oligonucleotide
tggtattataggacggtcggtt

SEQ ID NO: 3039 - DNA, 22 bp, Artificial Sequence
  Description of Artificial Sequence: Synthetic oligonucleotide
attcgatgattgttatttcggt

SEQ ID NO: 3040 - DNA, 22 bp, Artificial Sequence
  Description of Artificial Sequence: Synthetic oligonucleotide
caccgaaataacaatcatcgaa

SEQ ID NO: 3041 - DNA, 23 bp, Artificial Sequence
  Description of Artificial Sequence: Synthetic oligonucleotide
attataggacggtcggtttttat

SEQ ID NO: 3042 - DNA, 23 bp, Artificial Sequence
  Description of Artificial Sequence: Synthetic oligonucleotide
taattcgatgattgttatttcgg

SEQ ID NO: 3043 - DNA, 23 bp, Artificial Sequence
  Description of Artificial Sequence: Synthetic oligonucleotide
tagtggtattataggacggtcgg

SEQ ID NO: 3044 - DNA, 20 bp, Artificial Sequence
  Description of Artificial Sequence: Synthetic oligonucleotide
gcgttgagatcgagaagaag

SEQ ID NO: 3045 - DNA, 22 bp, Artificial Sequence
  Description of Artificial Sequence: Synthetic oligonucleotide
cgaaatcccgaaaaactctaat

SEQ ID NO: 3046 - DNA, 33 bp, Artificial Sequence
  Description of Artificial Sequence: Synthetic oligonucleotide
gacgtttcggagaaagtgcgtttagttgatttt

SEQ ID NO: 3047 - DNA, 22 bp, Artificial Sequence
  Description of Artificial Sequence: Synthetic oligonucleotide
attataggacggtcggttttta

SEQ ID NO: 3048 - DNA, 21 bp, Artificial Sequence
  Description of Artificial Sequence: Synthetic oligonucleotide
cgatgattgttatttcggtga

SEQ ID NO: 3049 - DNA, 24 bp, Artificial Sequence
  Description of Artificial Sequence: Synthetic oligonucleotide
tattataggacggtcggtttttat

SEQ ID NO: 3050 - DNA, 20 bp, Artificial Sequence
  Description of Artificial Sequence: Synthetic oligonucleotide
ataaaaacgccgtcctacac

SEQ ID NO: 3051 - DNA, 21 bp, Artificial Sequence
  Description of Artificial Sequence: Synthetic oligonucleotide
acgaaatcccgaaaaactcta

SEQ ID NO: 3052 - DNA, 22 bp, Artificial Sequence
  Description of Artificial Sequence: Synthetic oligonucleotide
gtattataggacggtcggtttt

SEQ ID NO: 3053 - DNA, 21 bp, Artificial Sequence
  Description of Artificial Sequence: Synthetic oligonucleotide
ccgaaataacaatcatcgaat

SEQ ID NO: 3054 - DNA, 21 bp, Artificial Sequence
  Description of Artificial Sequence: Synthetic oligonucleotide
accgaaataacaatcatcgaa

SEQ ID NO: 3055 - DNA, 21 bp, Artificial Sequence
  Description of Artificial Sequence: Synthetic oligonucleotide
ttcgatgattgttatttcggt

SEQ ID NO: 3056 - DNA, 20 bp, Artificial Sequence
  Description of Artificial Sequence: Synthetic oligonucleotide
cgataaaaacgccgtcctac

SEQ ID NO: 3057 - DNA, 20 bp, Artificial Sequence
  Description of Artificial Sequence: Synthetic oligonucleotide
acgataaaaacgccgtccta

SEQ ID NO: 3058 - DNA, 40 bp, Artificial Sequence
  Description of Artificial Sequence: Synthetic oligonucleotide
ggcgtatatggttaggtggcgtttggtaggcgacgttcgg

SEQ ID NO: 3059 - DNA, 21 bp, Artificial Sequence
  Description of Artificial Sequence: Synthetic oligonucleotide
tcgatgattgttatttcggtg

SEQ ID NO: 3060 - DNA, 20 bp, Artificial Sequence
  Description of Artificial Sequence: Synthetic oligonucleotide
gataaaaacgccgtcctaca

SEQ ID NO: 3061 - DNA, 19 bp, Artificial Sequence
  Description of Artificial Sequence: Synthetic oligonucleotide
aggcgttgagatcgagaag

SEQ ID NO: 3062 - DNA, 29 bp, Artificial Sequence
  Description of Artificial Sequence: Synthetic oligonucleotide
gggacgtttcggagaaagtgcgtttagtt

SEQ ID NO: 3063 - DNA, 22 bp, Artificial Sequence
  Description of Artificial Sequence: Synthetic oligonucleotide
gacgaaatcccgaaaaactcta

SEQ ID NO: 3064 - DNA, 23 bp, Artificial Sequence
  Description of Artificial Sequence: Synthetic oligonucleotide
tattataggacggtcggttttta

SEQ ID NO: 3065 - DNA, 21 bp, Artificial Sequence
  Description of Artificial Sequence: Synthetic oligonucleotide
tataggacggtcggtttttat

SEQ ID NO: 3066 - DNA, 20 bp, Artificial Sequence
  Description of Artificial Sequence: Synthetic oligonucleotide
taaaaacgccgtcctacacc

SEQ ID NO: 3067 - DNA, 25 bp, Artificial Sequence
  Description of Artificial Sequence: Synthetic oligonucleotide
ttaggtggcgtttggtaggcgacgt

SEQ ID NO: 3068 - DNA, 24 bp, Artificial Sequence
  Description of Artificial Sequence: Synthetic oligonucleotide
tttaattcgatgattgttatttcg

SEQ ID NO: 3069 - DNA, 19 bp, Artificial Sequence
  Description of Artificial Sequence: Synthetic oligonucleotide
aaggcgttgagatcgagaa

SEQ ID NO: 3070 - DNA, 29 bp, Artificial Sequence
  Description of Artificial Sequence: Synthetic oligonucleotide
aagggacgtttcggagaaagtgcgtttag

SEQ ID NO: 3071 - DNA, 21 bp, Artificial Sequence
  Description of Artificial Sequence: Synthetic oligonucleotide
ttataggacggtcggttttta

SEQ ID NO: 3072 - DNA, 18 bp, Artificial Sequence
  Description of Artificial Sequence: Synthetic oligonucleotide
tttttattgcgtgtcggc

SEQ ID NO: 3073 - DNA, 22 bp, Artificial Sequence
  Description of Artificial Sequence: Synthetic oligonucleotide
ccgattctaatacgaaattcca

SEQ ID NO: 3074 - DNA, 22 bp, Artificial Sequence
  Description of Artificial Sequence: Synthetic oligonucleotide
ggcggtcgcggcgaggtttttg

SEQ ID NO: 3075 - DNA, 23 bp, Artificial Sequence
  Description of Artificial Sequence: Synthetic oligonucleotide
ttaattcgatgattgttatttcg

SEQ ID NO: 3076 - DNA, 20 bp, Artificial Sequence
  Description of Artificial Sequence: Synthetic oligonucleotide
gtaggaaggcgttgagatcg

SEQ ID NO: 3077 - DNA, 27 bp, Artificial Sequence
  Description of Artificial Sequence: Synthetic oligonucleotide
agaagggacgtttcggagaaagtgcgt

SEQ ID NO: 3078 - DNA, 18 bp, Artificial Sequence
  Description of Artificial Sequence: Synthetic oligonucleotide
aaaacgccgtcctacacc

SEQ ID NO: 3079 - DNA, 25 bp, Artificial Sequence
  Description of Artificial Sequence: Synthetic oligonucleotide
tggttaggtggcgtttggtaggcga

SEQ ID NO: 3080 - DNA, 22 bp, Artificial Sequence
  Description of Artificial Sequence: Synthetic oligonucleotide
atagtcgggttttcgtagtgtt

SEQ ID NO: 3081 - DNA, 19 bp, Artificial Sequence
  Description of Artificial Sequence: Synthetic oligonucleotide
acctaaccatatacgcccg

SEQ ID NO: 3082 - DNA, 36 bp, Artificial Sequence
  Description of Artificial Sequence: Synthetic oligonucleotide
tatttcggtgaggatttgtgttgatggtcggagaat

SEQ ID NO: 3083 - DNA, 19 bp, Artificial Sequence
  Description of Artificial Sequence: Synthetic oligonucleotide
taggaaggcgttgagatcg

SEQ ID NO: 3084 - DNA, 22 bp, Artificial Sequence
  Description of Artificial Sequence: Synthetic oligonucleotide
tagtcgggttttcgtagtgttg

SEQ ID NO: 3085 - DNA, 19 bp, Artificial Sequence
  Description of Artificial Sequence: Synthetic oligonucleotide
ggcgttgagatcgagaaga

SEQ ID NO: 3086 - DNA, 19 bp, Artificial Sequence
  Description of Artificial Sequence: Synthetic oligonucleotide
gaaggcgttgagatcgaga

SEQ ID NO: 3087 - DNA, 28 bp, Artificial Sequence
  Description of Artificial Sequence: Synthetic oligonucleotide
gaagggacgtttcggagaaagtgcgttt

SEQ ID NO: 3088 - DNA, 25 bp, Artificial Sequence
  Description of Artificial Sequence: Synthetic oligonucleotide
cgaaataacaatcatcgaattaaaa

SEQ ID NO: 3089 - DNA, 19 bp, Artificial Sequence
  Description of Artificial Sequence: Synthetic oligonucleotide
aacgataaaaacgccgtcc

SEQ ID NO: 3090 - DNA, 19 bp, Artificial Sequence
  Description of Artificial Sequence: Synthetic oligonucleotide
aaaaacgccgtcctacacc

SEQ ID NO: 3091 - DNA, 22 bp, Artificial Sequence
  Description of Artificial Sequence: Synthetic oligonucleotide
cgatgattgttatttcggtgag

SEQ ID NO: 3092 - DNA, 19 bp, Artificial Sequence
  Description of Artificial Sequence: Synthetic oligonucleotide
taaaaacgccgtcctacac

SEQ ID NO: 3093 - DNA, 20 bp, Artificial Sequence
  Description of Artificial Sequence: Synthetic oligonucleotide
ataggacggtcggtttttat

SEQ ID NO: 3094 - DNA, 17 bp, Artificial Sequence
  Description of Artificial Sequence: Synthetic oligonucleotide
acgtcgcctaccaaacg

SEQ ID NO: 3095 - DNA, 31 bp, Artificial Sequence
  Description of Artificial Sequence: Synthetic oligonucleotide
gatttgtgttgatggtcggagaattttgcgt

SEQ ID NO: 3096 - DNA, 25 bp, Artificial Sequence
  Description of Artificial Sequence: Synthetic oligonucleotide
ttttaattcgatgattgttatttcg

SEQ ID NO: 3097 - DNA, 21 bp, Artificial Sequence
  Description of Artificial Sequence: Synthetic oligonucleotide
acgaacgcacataaccaaata

SEQ ID NO: 3098 - DNA, 22 bp, Artificial Sequence
  Description of Artificial Sequence: Synthetic oligonucleotide
tttcggagttttagcgttttta

SEQ ID NO: 3099 - DNA, 29 bp, Artificial Sequence
  Description of Artificial Sequence: Synthetic oligonucleotide
aacggtttggggtggggcggtaagagcgt

SEQ ID NO: 3100 - DNA, 22 bp, Artificial Sequence
  Description of Artificial Sequence: Synthetic oligonucleotide
aatacaaaacgacgctcttacc

SEQ ID NO: 3101 - DNA, 21 bp, Artificial Sequence
  Description of Artificial Sequence: Synthetic oligonucleotide
gttttcggagttttagcgttt

SEQ ID NO: 3102 - DNA, 35 bp, Artificial Sequence
  Description of Artificial Sequence: Synthetic oligonucleotide
ttaggaagtcgaaggatttaggtttaggtaacggt

SEQ ID NO: 3103 - DNA, 21 bp, Artificial Sequence
  Description of Artificial Sequence: Synthetic oligonucleotide
tgttttcggagttttagcgtt

SEQ ID NO: 3104 - DNA, 22 bp, Artificial Sequence
  Description of Artificial Sequence: Synthetic oligonucleotide
atcgaaactaaacccctaaacg

SEQ ID NO: 3105 - DNA, 23 bp, Artificial Sequence
  Description of Artificial Sequence: Synthetic oligonucleotide
ttcgtaaaagtagcgtttttagc

SEQ ID NO: 3106 - DNA, 22 bp, Artificial Sequence
  Description of Artificial Sequence: Synthetic oligonucleotide
ggggaggcgcgggttaggttgg

SEQ ID NO: 3107 - DNA, 20 bp, Artificial Sequence
  Description of Artificial Sequence: Synthetic oligonucleotide
ttgttttcggagttttagcg

SEQ ID NO: 3108 - DNA, 22 bp, Artificial Sequence
  Description of Artificial Sequence: Synthetic oligonucleotide
tcgtaaaagtagcgtttttagc

SEQ ID NO: 3109 - DNA, 22 bp, Artificial Sequence
  Description of Artificial Sequence: Synthetic oligonucleotide
caaataacgcctaacaaacgac

SEQ ID NO: 3110 - DNA, 22 bp, Artificial Sequence
  Description of Artificial Sequence: Synthetic oligonucleotide
actcgaattttcctacgatcac

SEQ ID NO: 3111 - DNA, 20 bp, Artificial Sequence
  Description of Artificial Sequence: Synthetic oligonucleotide
attttgtcggggtcgtattt

SEQ ID NO: 3112 - DNA, 41 bp, Artificial Sequence
  Description of Artificial Sequence: Synthetic oligonucleotide
tagaaacgaaaattcgatagaagtagtaatagttgttgtgg

SEQ ID NO: 3113 - DNA, 20 bp, Artificial Sequence
  Description of Artificial Sequence: Synthetic oligonucleotide
cgaacgcacataaccaaata

SEQ ID NO: 3114 - DNA, 24 bp, Artificial Sequence
  Description of Artificial Sequence: Synthetic oligonucleotide
attcgtaaaagtagcgtttttagc

SEQ ID NO: 3115 - DNA, 21 bp, Artificial Sequence
  Description of Artificial Sequence: Synthetic oligonucleotide
tcgaaactaaacccctaaacg

SEQ ID NO: 3116 - DNA, 21 bp, Artificial Sequence
  Description of Artificial Sequence: Synthetic oligonucleotide
ttcggagttttagcgttttta

SEQ ID NO: 3117 - DNA, 22 bp, Artificial Sequence
  Description of Artificial Sequence: Synthetic oligonucleotide
gaatacaaaacgacgctcttac

SEQ ID NO: 3118 - DNA, 20 bp, Artificial Sequence
  Description of Artificial Sequence: Synthetic oligonucleotide
atcacataaccgaatcctcg

SEQ ID NO: 3119 - DNA, 21 bp, Artificial Sequence
  Description of Artificial Sequence: Synthetic oligonucleotide
gttcgtagcgtagggtttttc

SEQ ID NO: 3120 - DNA, 34 bp, Artificial Sequence
  Description of Artificial Sequence: Synthetic oligonucleotide
ggtttttatcgaggtgatagttatcggattggga

SEQ ID NO: 3121 - DNA, 20 bp, Artificial Sequence
  Description of Artificial Sequence: Synthetic oligonucleotide
ttttcggagttttagcgttt

SEQ ID NO: 3122 - DNA, 19 bp, Artificial Sequence
  Description of Artificial Sequence: Synthetic oligonucleotide
ttttgtcggggtcgtattt

SEQ ID NO: 3123 - DNA, 22 bp, Artificial Sequence
  Description of Artificial Sequence: Synthetic oligonucleotide
ctaataaccgaaaaaccctacg

SEQ ID NO: 3124 - DNA, 21 bp, Artificial Sequence
  Description of Artificial Sequence: Synthetic oligonucleotide
ggtaagagcgtcgttttgtat

SEQ ID NO: 3125 - DNA, 31 bp, Artificial Sequence
  Description of Artificial Sequence: Synthetic oligonucleotide
tgttaggcgttatttggttatgtgcgttcgt

SEQ ID NO: 3126 - DNA, 20 bp, Artificial Sequence
  Description of Artificial Sequence: Synthetic oligonucleotide
ataaccgaatcctcgcaata

SEQ ID NO: 3127 - DNA, 21 bp, Artificial Sequence
  Description of Artificial Sequence: Synthetic oligonucleotide
ctaacgcaaccgcttaaaact

SEQ ID NO: 3128 - DNA, 21 bp, Artificial Sequence
  Description of Artificial Sequence: Synthetic oligonucleotide
cggagtatcggggattttatt

SEQ ID NO: 3129 - DNA, 33 bp, Artificial Sequence
  Description of Artificial Sequence: Synthetic oligonucleotide
agttagggtatttgcgcggtttcgattttaatg

SEQ ID NO: 3130 - DNA, 19 bp, Artificial Sequence
  Description of Artificial Sequence: Synthetic oligonucleotide
cgaaaaaccctacgctacg

SEQ ID NO: 3131 - DNA, 22 bp, Artificial Sequence
  Description of Artificial Sequence: Synthetic oligonucleotide
ggtaagagcgtcgttttgtatt

SEQ ID NO: 3132 - DNA, 30 bp, Artificial Sequence
  Description of Artificial Sequence: Synthetic oligonucleotide
ttcggacgtcgtttgttaggcgttatttgg

SEQ ID NO: 3133 - DNA, 25 bp, Artificial Sequence
  Description of Artificial Sequence: Synthetic oligonucleotide
tattcgtaaaagtagcgtttttagc

SEQ ID NO: 3134 - DNA, 21 bp, Artificial Sequence
  Description of Artificial Sequence: Synthetic oligonucleotide
cataaccgaatcctcgcaata

SEQ ID NO: 3135 - DNA, 23 bp, Artificial Sequence
  Description of Artificial Sequence: Synthetic oligonucleotide
actaataaccgaaaaaccctacg

SEQ ID NO: 3136 - DNA, 22 bp, Artificial Sequence
  Description of Artificial Sequence: Synthetic oligonucleotide
tcgaaactaaacccctaaacga

SEQ ID NO: 3137 - DNA, 23 bp, Artificial Sequence
  Description of Artificial Sequence: Synthetic oligonucleotide
cgtaaaagtagcgtttttagcgt

SEQ ID NO: 3138 - DNA, 23 bp, Artificial Sequence
  Description of Artificial Sequence: Synthetic oligonucleotide
gaatacaaaacgacgctcttacc

SEQ ID NO: 3139 - DNA, 21 bp, Artificial Sequence
  Description of Artificial Sequence: Synthetic oligonucleotide
atacaaaacgacgctcttacc

SEQ ID NO: 3140 - DNA, 21 bp, Artificial Sequence
  Description of Artificial Sequence: Synthetic oligonucleotide
acgtcgtttgttaggcgttat

SEQ ID NO: 3141 - DNA, 27 bp, Artificial Sequence
  Description of Artificial Sequence: Synthetic oligonucleotide
tggttatgtgcgttcgtagcgtagggt

SEQ ID NO: 3142 - DNA, 24 bp, Artificial Sequence
  Description of Artificial Sequence: Synthetic oligonucleotide
cgaaggatttaggtttaggtaacg

SEQ ID NO: 3143 - DNA, 22 bp, Artificial Sequence
  Description of Artificial Sequence: Synthetic oligonucleotide
tggggtggggcggtaagagcgt

SEQ ID NO: 3144 - DNA, 22 bp, Artificial Sequence
  Description of Artificial Sequence: Synthetic oligonucleotide
ctcgaattttcctacgatcacc

SEQ ID NO: 3145 - DNA, 21 bp, Artificial Sequence
  Description of Artificial Sequence: Synthetic oligonucleotide
tatttcggagtatcggggatt

SEQ ID NO: 3146 - DNA, 21 bp, Artificial Sequence
  Description of Artificial Sequence: Synthetic oligonucleotide
tcgaattttcctacgatcacc

SEQ ID NO: 3147 - DNA, 20 bp, Artificial Sequence
  Description of Artificial Sequence: Synthetic oligonucleotide
taacgcaaccgcttaaaact

SEQ ID NO: 3148 - DNA, 21 bp, Artificial Sequence
  Description of Artificial Sequence: Synthetic oligonucleotide
aattttgtcggggtcgtattt

SEQ ID NO: 3149 - DNA, 23 bp, Artificial Sequence
  Description of Artificial Sequence: Synthetic oligonucleotide
aatcgaaactaaacccctaaacg

SEQ ID NO: 3150 - DNA, 19 bp, Artificial Sequence
  Description of Artificial Sequence: Synthetic oligonucleotide
ataaccgaatcctcgcaat

SEQ ID NO: 3151 - DNA, 22 bp, Artificial Sequence
  Description of Artificial Sequence: Synthetic oligonucleotide
gtcgtttgttaggcgttatttg

SEQ ID NO: 3152 - DNA, 22 bp, Artificial Sequence
  Description of Artificial Sequence: Synthetic oligonucleotide
gttatgtgcgttcgtagcgtag

SEQ ID NO: 3153 - DNA, 20 bp, Artificial Sequence
  Description of Artificial Sequence: Synthetic oligonucleotide
cgtcgtttgttaggcgttat

SEQ ID NO: 3154 - DNA, 29 bp, Artificial Sequence
  Description of Artificial Sequence: Synthetic oligonucleotide
agcgttaaggtttggggaggcgcgggtta

SEQ ID NO: 3155 - DNA, 20 bp, Artificial Sequence
  Description of Artificial Sequence: Synthetic oligonucleotide
cataaccgaatcctcgcaat

SEQ ID NO: 3156 - DNA, 29 bp, Artificial Sequence
  Description of Artificial Sequence: Synthetic oligonucleotide
ggttatgtgcgttcgtagcgtagggtttt

SEQ ID NO: 3157 - DNA, 18 bp, Artificial Sequence
  Description of Artificial Sequence: Synthetic oligonucleotide
attcggtggcgataggtt

SEQ ID NO: 3158 - DNA, 45 bp, Artificial Sequence
  Description of Artificial Sequence: Synthetic oligonucleotide
ttcgtaaaagtagcgtttttagcgttaaggtttggggaggcgcgg

SEQ ID NO: 3159 - DNA, 22 bp, Artificial Sequence
  Description of Artificial Sequence: Synthetic oligonucleotide
gttttattcgcgtttatggtgt

SEQ ID NO: 3160 - DNA, 22 bp, Artificial Sequence
  Description of Artificial Sequence: Synthetic oligonucleotide
acttcaacgatcctctacgaaa

SEQ ID NO: 3161 - DNA, 34 bp, Artificial Sequence
  Description of Artificial Sequence: Synthetic oligonucleotide
gggataggttcgggatagtattgtttacgttgtt

SEQ ID NO: 3162 - DNA, 22 bp, Artificial Sequence
  Description of Artificial Sequence: Synthetic oligonucleotide
aacttcaacgatcctctacgaa

SEQ ID NO: 3163 - DNA, 22 bp, Artificial Sequence
  Description of Artificial Sequence: Synthetic oligonucleotide
caacgatcctctacgaaaaatc

SEQ ID NO: 3164 - DNA, 22 bp, Artificial Sequence
  Description of Artificial Sequence: Synthetic oligonucleotide
tcaacgatcctctacgaaaaat

SEQ ID NO: 3165 - DNA, 22 bp, Artificial Sequence
  Description of Artificial Sequence: Synthetic oligonucleotide
agttttattcgcgtttatggtg

SEQ ID NO: 3166 - DNA, 22 bp, Artificial Sequence
  Description of Artificial Sequence: Synthetic oligonucleotide
tttattcgcgtttatggtgtaa

SEQ ID NO: 3167 - DNA, 22 bp, Artificial Sequence
  Description of Artificial Sequence: Synthetic oligonucleotide
ttttattcgcgtttatggtgta

SEQ ID NO: 3168 - DNA, 22 bp, Artificial Sequence
  Description of Artificial Sequence: Synthetic oligonucleotide
cttcaacgatcctctacgaaaa

SEQ ID NO: 3169 - DNA, 22 bp, Artificial Sequence
  Description of Artificial Sequence: Synthetic oligonucleotide
acaacttcaacgatcctctacg

SEQ ID NO: 3170 - DNA, 22 bp, Artificial Sequence
  Description of Artificial Sequence: Synthetic oligonucleotide
gggtttttagttttattcgcgt

SEQ ID NO: 3171 - DNA, 22 bp, Artificial Sequence
  Description of Artificial Sequence: Synthetic oligonucleotide
ttcgcgtttatggtgtaagttt

SEQ ID NO: 3172 - DNA, 22 bp, Artificial Sequence
  Description of Artificial Sequence: Synthetic oligonucleotide
ttattcgcgtttatggtgtaag

SEQ ID NO: 3173 - DNA, 22 bp, Artificial Sequence
  Description of Artificial Sequence: Synthetic oligonucleotide
ttcaacgatcctctacgaaaaa

SEQ ID NO: 3174 - DNA, 21 bp, Artificial Sequence
  Description of Artificial Sequence: Synthetic oligonucleotide
cgcgtttatggtgtaagtttg

SEQ ID NO: 3175 - DNA, 23 bp, Artificial Sequence
  Description of Artificial Sequence: Synthetic oligonucleotide
tagttttattcgcgtttatggtg

SEQ ID NO: 3176 - DNA, 23 bp, Artificial Sequence
  Description of Artificial Sequence: Synthetic oligonucleotide
tttagttttattcgcgtttatgg

SEQ ID NO: 3177 - DNA, 34 bp, Artificial Sequence
  Description of Artificial Sequence: Synthetic oligonucleotide
agggataggttcgggatagtattgtttacgttgt

SEQ ID NO: 3178 - DNA, 22 bp, Artificial Sequence
  Description of Artificial Sequence: Synthetic oligonucleotide
caacttcaacgatcctctacga

SEQ ID NO: 3179 - DNA, 22 bp, Artificial Sequence
  Description of Artificial Sequence: Synthetic oligonucleotide
tattcgcgtttatggtgtaagt

SEQ ID NO: 3180 - DNA, 22 bp, Artificial Sequence
  Description of Artificial Sequence: Synthetic oligonucleotide
ttagttttattcgcgtttatgg

SEQ ID NO: 3181 - DNA, 21 bp, Artificial Sequence
  Description of Artificial Sequence: Synthetic oligonucleotide
tcgcgtttatggtgtaagttt

SEQ ID NO: 3182 - DNA, 21 bp, Artificial Sequence
  Description of Artificial Sequence: Synthetic oligonucleotide
ttcaacgatcctctacgaaaa

SEQ ID NO: 3183 - DNA, 22 bp, Artificial Sequence
  Description of Artificial Sequence: Synthetic oligonucleotide
aacgatcctctacgaaaaatct

SEQ ID NO: 3184 - DNA, 21 bp, Artificial Sequence
  Description of Artificial Sequence: Synthetic oligonucleotide
gttttattcgcgtttatggtg

SEQ ID NO: 3185 - DNA, 23 bp, Artificial Sequence
  Description of Artificial Sequence: Synthetic oligonucleotide
attcgcgtttatggtgtaagttt

SEQ ID NO: 3186 - DNA, 22 bp, Artificial Sequence
  Description of Artificial Sequence: Synthetic oligonucleotide
gtttcgtttttgtattaagcgg

SEQ ID NO: 3187 - DNA, 20 bp, Artificial Sequence
  Description of Artificial Sequence: Synthetic oligonucleotide
aatataacccgcgcctctac

SEQ ID NO: 3188 - DNA, 21 bp, Artificial Sequence
  Description of Artificial Sequence: Synthetic oligonucleotide
gtgcgcgtttggcgatcgcgg

SEQ ID NO: 3189 - DNA, 21 bp, Artificial Sequence
  Description of Artificial Sequence: Synthetic oligonucleotide
cttcaacgatcctctacgaaa

SEQ ID NO: 3190 - DNA, 22 bp, Artificial Sequence
  Description of Artificial Sequence: Synthetic oligonucleotide
cgatcctctacgaaaaatctaa

SEQ ID NO: 3191 - DNA, 34 bp, Artificial Sequence
  Description of Artificial Sequence: Synthetic oligonucleotide
tgtagggataggttcgggatagtattgtttacgt

SEQ ID NO: 3192 - DNA, 22 bp, Artificial Sequence
  Description of Artificial Sequence: Synthetic oligonucleotide
atgtatttttgtcgtcggttgt

SEQ ID NO: 3193 - DNA, 22 bp, Artificial Sequence
  Description of Artificial Sequence: Synthetic oligonucleotide
agcgggcgttgattgtgcgcgt

SEQ ID NO: 3194 - DNA, 21 bp, Artificial Sequence
  Description of Artificial Sequence: Synthetic oligonucleotide
attcgcgtttatggtgtaagt

SEQ ID NO: 3195 - DNA, 23 bp, Artificial Sequence
  Description of Artificial Sequence: Synthetic oligonucleotide
acgatcctctacgaaaaatctaa

SEQ ID NO: 3196 - DNA, 21 bp, Artificial Sequence
  Description of Artificial Sequence: Synthetic oligonucleotide
caacttcaacgatcctctacg

SEQ ID NO: 3197 - DNA, 23 bp, Artificial Sequence
  Description of Artificial Sequence: Synthetic oligonucleotide
aacaacttcaacgatcctctacg

SEQ ID NO: 3198 - DNA, 21 bp, Artificial Sequence
  Description of Artificial Sequence: Synthetic oligonucleotide
gtttcggttttagcgtttgtt

SEQ ID NO: 3199 - DNA, 23 bp, Artificial Sequence
  Description of Artificial Sequence: Synthetic oligonucleotide
ccgacgacaaaaatacattaact

SEQ ID NO: 3200 - DNA, 31 bp, Artificial Sequence
  Description of Artificial Sequence: Synthetic oligonucleotide
gtcggggtttcgggagattttgagtattcgt

SEQ ID NO: 3201 - DNA, 21 bp, Artificial Sequence
  Description of Artificial Sequence: Synthetic oligonucleotide
ttattcgcgtttatggtgtaa

SEQ ID NO: 3202 - DNA, 22 bp, Artificial Sequence
  Description of Artificial Sequence: Synthetic oligonucleotide
aatgtatttttgtcgtcggttg

SEQ ID NO: 3203 - DNA, 23 bp, Artificial Sequence
  Description of Artificial Sequence: Synthetic oligonucleotide
gggtttttagttttattcgcgtt

SEQ ID NO: 3204 - DNA, 21 bp, Artificial Sequence
  Description of Artificial Sequence: Synthetic oligonucleotide
tgtatttttgtcgtcggttgt

SEQ ID NO: 3205 - DNA, 23 bp, Artificial Sequence
  Description of Artificial Sequence: Synthetic oligonucleotide
tcaacgatcctctacgaaaaatc

SEQ ID NO: 3206 - DNA, 22 bp, Artificial Sequence
  Description of Artificial Sequence: Synthetic oligonucleotide
cttccgaaactacgaactcaaa

SEQ ID NO: 3207 - DNA, 22 bp, Artificial Sequence
  Description of Artificial Sequence: Synthetic oligonucleotide
gcgttggtcgagtgtattttat

SEQ ID NO: 3208 - DNA, 23 bp, Artificial Sequence
  Description of Artificial Sequence: Synthetic oligonucleotide
agcggtgcgaggaaagttcgggg

SEQ ID NO: 3209 - DNA, 22 bp, Artificial Sequence
  Description of Artificial Sequence: Synthetic oligonucleotide
aaatcgacgaacgatctaaaaa

SEQ ID NO: 3210 - DNA, 21 bp, Artificial Sequence
  Description of Artificial Sequence: Synthetic oligonucleotide
gtagtttcggaagcgagttgt

SEQ ID NO: 3211 - DNA, 40 bp, Artificial Sequence
  Description of Artificial Sequence: Synthetic oligonucleotide
atcgcgcgtattttaagattcgcgttatgtaaattatcgt

SEQ ID NO: 3212 - DNA, 22 bp, Artificial Sequence
  Description of Artificial Sequence: Synthetic oligonucleotide
aaaatcgacgaacgatctaaaa

SEQ ID NO: 3213 - DNA, 21 bp, Artificial Sequence
  Description of Artificial Sequence: Synthetic oligonucleotide
ttccgaaactacgaactcaaa

SEQ ID NO: 3214 - DNA, 20 bp, Artificial Sequence
  Description of Artificial Sequence: Synthetic oligonucleotide
tagtttcggaagcgagttgt

SEQ ID NO: 3215 - DNA, 21 bp, Artificial Sequence
  Description of Artificial Sequence: Synthetic oligonucleotide
caaaatcgacgaacgatctaa

SEQ ID NO: 3216 - DNA, 21 bp, Artificial Sequence
  Description of Artificial Sequence: Synthetic oligonucleotide
gcttccgaaactacgaactca

SEQ ID NO: 3217 - DNA, 22 bp, Artificial Sequence
  Description of Artificial Sequence: Synthetic oligonucleotide
tatctttcaaaatcgacgaacg

SEQ ID NO: 3218 - DNA, 22 bp, Artificial Sequence
  Description of Artificial Sequence: Synthetic oligonucleotide
cctctaacgaccaaactacgaa

SEQ ID NO: 3219 - DNA, 21 bp, Artificial Sequence
  Description of Artificial Sequence: Synthetic oligonucleotide
gtgcgtataaaagcgcgtaat

SEQ ID NO: 3220 - DNA, 34 bp, Artificial Sequence
  Description of Artificial Sequence: Synthetic oligonucleotide
agttcgcgtattcgtcgtttatataggaggtttt

SEQ ID NO: 3221 - DNA, 21 bp, Artificial Sequence
  Description of Artificial Sequence: Synthetic oligonucleotide
tcaaaatcgacgaacgatcta

SEQ ID NO: 3222 - DNA, 20 bp, Artificial Sequence
  Description of Artificial Sequence: Synthetic oligonucleotide
tgcgtataaaagcgcgtaat

SEQ ID NO: 3223 - DNA, 19 bp, Artificial Sequence
  Description of Artificial Sequence: Synthetic oligonucleotide
cgtagtttcggaagcgagt

SEQ ID NO: 3224 - DNA, 22 bp, Artificial Sequence
  Description of Artificial Sequence: Synthetic oligonucleotide
ttcaaaatcgacgaacgatcta

SEQ ID NO: 3225 - DNA, 21 bp, Artificial Sequence
  Description of Artificial Sequence: Synthetic oligonucleotide
gcgtataaaagcgcgtaattg

SEQ ID NO: 3226 - DNA, 23 bp, Artificial Sequence
  Description of Artificial Sequence: Synthetic oligonucleotide
aacgaccaaactacgaaatacaa

SEQ ID NO: 3227 - DNA, 19 bp, Artificial Sequence
  Description of Artificial Sequence: Synthetic oligonucleotide
agtttcggaagcgagttgt

SEQ ID NO: 3228 - DNA, 19 bp, Artificial Sequence
  Description of Artificial Sequence: Synthetic oligonucleotide
cgcttccgaaactacgaac

SEQ ID NO: 3229 - DNA, 21 bp, Artificial Sequence
  Description of Artificial Sequence: Synthetic oligonucleotide
atctttcaaaatcgacgaacg

SEQ ID NO: 3230 - DNA, 22 bp, Artificial Sequence
  Description of Artificial Sequence: Synthetic oligonucleotide
acgacttcccataaatcgaata

SEQ ID NO: 3231 - DNA, 49 bp, Artificial Sequence
  Description of Artificial Sequence: Synthetic oligonucleotide
tatcgttattacgaattgtttttttagatcgttcgtcgattttgaaaga

SEQ ID NO: 3232 - DNA, 22 bp, Artificial Sequence
  Description of Artificial Sequence: Synthetic oligonucleotide
cgaccaaactacgaaatacaac

SEQ ID NO: 3233 - DNA, 22 bp, Artificial Sequence
  Description of Artificial Sequence: Synthetic oligonucleotide
acgaccaaactacgaaatacaa

SEQ ID NO: 3234 - DNA, 21 bp, Artificial Sequence
  Description of Artificial Sequence: Synthetic oligonucleotide
aatcgacgaacgatctaaaaa

SEQ ID NO: 3235 - DNA, 22 bp, Artificial Sequence
  Description of Artificial Sequence: Synthetic oligonucleotide
tcctctaacgaccaaactacga

SEQ ID NO: 3236 - DNA, 20 bp, Artificial Sequence
  Description of Artificial Sequence: Synthetic oligonucleotide
gtgcgtataaaagcgcgtaa

SEQ ID NO: 3237 - DNA, 22 bp, Artificial Sequence
  Description of Artificial Sequence: Synthetic oligonucleotide
ctctaacgaccaaactacgaaa

SEQ ID NO: 3238 - DNA, 23 bp, Artificial Sequence
  Description of Artificial Sequence: Synthetic oligonucleotide
atatctttcaaaatcgacgaacg

SEQ ID NO: 3239 - DNA, 23 bp, Artificial Sequence
  Description of Artificial Sequence: Synthetic oligonucleotide
cattattctaaaaccgactcgac

SEQ ID NO: 3240 - DNA, 21 bp, Artificial Sequence
  Description of Artificial Sequence: Synthetic oligonucleotide
gttcgcgtattcgtcgtttat

SEQ ID NO: 3241 - DNA, 33 bp, Artificial Sequence
  Description of Artificial Sequence: Synthetic oligonucleotide
ggttgtatttcgtagtttggtcgttagaggagg

SEQ ID NO: 3242 - DNA, 19 bp, Artificial Sequence
  Description of Artificial Sequence: Synthetic oligonucleotide
tgcgtataaaagcgcgtaa

SEQ ID NO: 3243 - DNA, 20 bp, Artificial Sequence
  Description of Artificial Sequence: Synthetic oligonucleotide
cgtataaaagcgcgtaattg

SEQ ID NO: 3244 - DNA, 19 bp, Artificial Sequence
  Description of Artificial Sequence: Synthetic oligonucleotide
ggcgttggtcgagtgtatt

SEQ ID NO: 3245 - DNA, 20 bp, Artificial Sequence
  Description of Artificial Sequence: Synthetic oligonucleotide
tccgaaactacgaactcaaa

SEQ ID NO: 3246 - DNA, 20 bp, Artificial Sequence
  Description of Artificial Sequence: Synthetic oligonucleotide
ttcgcgtattcgtcgtttat

SEQ ID NO: 3247 - DNA, 24 bp, Artificial Sequence
  Description of Artificial Sequence: Synthetic oligonucleotide
acattattctaaaaccgactcgac

SEQ ID NO: 3248 - DNA, 18 bp, Artificial Sequence
  Description of Artificial Sequence: Synthetic oligonucleotide
tcgcttccgaaactacga

SEQ ID NO: 3249 - DNA, 22 bp, Artificial Sequence
  Description of Artificial Sequence: Synthetic oligonucleotide
aacgataatttacataacgcga

SEQ ID NO: 3250 - DNA, 21 bp, Artificial Sequence
  Description of Artificial Sequence: Synthetic oligonucleotide
aatttgagttcgtagtttcgg

SEQ ID NO: 3251 - DNA, 26 bp, Artificial Sequence
  Description of Artificial Sequence: Synthetic oligonucleotide
tgcgaggttggttcggaatcgcgcgt

SEQ ID NO: 3252 - DNA, 22 bp, Artificial Sequence
  Description of Artificial Sequence: Synthetic oligonucleotide
attcgagcgagtaagaagagtg

SEQ ID NO: 3253 - DNA, 22 bp, Artificial Sequence
  Description of Artificial Sequence: Synthetic oligonucleotide
tccatataaacgaaccgaaaac

SEQ ID NO: 3254 - DNA, 32 bp, Artificial Sequence
  Description of Artificial Sequence: Synthetic oligonucleotide
atggaggagttagcgtttattgaagtcggttt

SEQ ID NO: 3255 - DNA, 22 bp, Artificial Sequence
  Description of Artificial Sequence: Synthetic oligonucleotide
ctccatataaacgaaccgaaaa

SEQ ID NO: 3256 - DNA, 22 bp, Artificial Sequence
  Description of Artificial Sequence: Synthetic oligonucleotide
cgagcgagtaagaagagtgttt

SEQ ID NO: 3257 - DNA, 22 bp, Artificial Sequence
  Description of Artificial Sequence: Synthetic oligonucleotide
aaactccatataaacgaaccga

SEQ ID NO: 3258 - DNA, 32 bp, Artificial Sequence
  Description of Artificial Sequence: Synthetic oligonucleotide
gaggagttagcgtttattgaagtcggtttcgt

SEQ ID NO: 3259 - DNA, 22 bp, Artificial Sequence
  Description of Artificial Sequence: Synthetic oligonucleotide
aactccatataaacgaaccgaa

SEQ ID NO: 3260 - DNA, 22 bp, Artificial Sequence
  Description of Artificial Sequence: Synthetic oligonucleotide
actccatataaacgaaccgaaa

SEQ ID NO: 3261 - DNA, 22 bp, Artificial Sequence
  Description of Artificial Sequence: Synthetic oligonucleotide
gttaagcgttcgtcgttagaat

SEQ ID NO: 3262 - DNA, 22 bp, Artificial Sequence
  Description of Artificial Sequence: Synthetic oligonucleotide
aaaacgaaaccgacttcaataa

SEQ ID NO: 3263 - DNA, 33 bp, Artificial Sequence
  Description of Artificial Sequence: Synthetic oligonucleotide
aggaattcgagcgagtaagaagagtgtttgatt

SEQ ID NO: 3264 - DNA, 22 bp, Artificial Sequence
  Description of Artificial Sequence: Synthetic oligonucleotide
ttcgagcgagtaagaagagtgt

SEQ ID NO: 3265 - DNA, 22 bp, Artificial Sequence
  Description of Artificial Sequence: Synthetic oligonucleotide
caaactccatataaacgaaccg

SEQ ID NO: 3266 - DNA, 22 bp, Artificial Sequence
  Description of Artificial Sequence: Synthetic oligonucleotide
gaaaacgaaaccgacttcaata

SEQ ID NO: 3267 - DNA, 22 bp, Artificial Sequence
  Description of Artificial Sequence: Synthetic oligonucleotide
aacgaaaccgacttcaataaac

SEQ ID NO: 3268 - DNA, 21 bp, Artificial Sequence
  Description of Artificial Sequence: Synthetic oligonucleotide
agagcgaagtttgttaagcgt

SEQ ID NO: 3269 - DNA, 22 bp, Artificial Sequence
  Description of Artificial Sequence: Synthetic oligonucleotide
aattcgagcgagtaagaagagt

SEQ ID NO: 3270 - DNA, 21 bp, Artificial Sequence
  Description of Artificial Sequence: Synthetic oligonucleotide
tgttaagcgttcgtcgttaga

SEQ ID NO: 3271 - DNA, 21 bp, Artificial Sequence
  Description of Artificial Sequence: Synthetic oligonucleotide
catataaacgaaccgaaaacg

SEQ ID NO: 3272 - DNA, 32 bp, Artificial Sequence
  Description of Artificial Sequence: Synthetic oligonucleotide
aaatggaggagttagcgtttattgaagtcggt

SEQ ID NO: 3273 - DNA, 21 bp, Artificial Sequence
  Description of Artificial Sequence: Synthetic oligonucleotide
gagcgaagtttgttaagcgtt

SEQ ID NO: 3274 - DNA, 23 bp, Artificial Sequence
  Description of Artificial Sequence: Synthetic oligonucleotide
aaacgaaaccgacttcaataaac

SEQ ID NO: 3275 - DNA, 22 bp, Artificial Sequence
  Description of Artificial Sequence: Synthetic oligonucleotide
cggttttcgaggaatataggat

SEQ ID NO: 3276 - DNA, 23 bp, Artificial Sequence
  Description of Artificial Sequence: Synthetic oligonucleotide
cgcgaatttaactactacttccc

SEQ ID NO: 3277 - DNA, 25 bp, Artificial Sequence
  Description of Artificial Sequence: Synthetic oligonucleotide
gggggtcgggtagcgggttattgag

SEQ ID NO: 3278 - DNA, 21 bp, Artificial Sequence
  Description of Artificial Sequence: Synthetic oligonucleotide
gaaaccgacttcaataaacgc

SEQ ID NO: 3279 - DNA, 21 bp, Artificial Sequence
  Description of Artificial Sequence: Synthetic oligonucleotide
tcgagcgagtaagaagagtgt

SEQ ID NO: 3280 - DNA, 22 bp, Artificial Sequence
  Description of Artificial Sequence: Synthetic oligonucleotide
gtagagcgaagtttgttaagcg

SEQ ID NO: 3281 - DNA, 22 bp, Artificial Sequence
  Description of Artificial Sequence: Synthetic oligonucleotide
ttgttaagcgttcgtcgttaga

SEQ ID NO: 3282 - DNA, 21 bp, Artificial Sequence
  Description of Artificial Sequence: Synthetic oligonucleotide
ttaagcgttcgtcgttagaat

SEQ ID NO: 3283 - DNA, 22 bp, Artificial Sequence
  Description of Artificial Sequence: Synthetic oligonucleotide
gttttcgaggaatataggatcg

SEQ ID NO: 3284 - DNA, 21 bp, Artificial Sequence
  Description of Artificial Sequence: Synthetic oligonucleotide
agcgttcgtcgttagaatttg

SEQ ID NO: 3285 - DNA, 20 bp, Artificial Sequence
  Description of Artificial Sequence: Synthetic oligonucleotide
gcgttcgtcgttagaatttg

SEQ ID NO: 3286 - DNA, 22 bp, Artificial Sequence
  Description of Artificial Sequence: Synthetic oligonucleotide
ggagagttaaggcgtttcgtag

SEQ ID NO: 3287 - DNA, 21 bp, Artificial Sequence
  Description of Artificial Sequence: Synthetic oligonucleotide
gtaaccccgaacgaactaaaa

SEQ ID NO: 3288 - DNA, 33 bp, Artificial Sequence
  Description of Artificial Sequence: Synthetic oligonucleotide
ttgtcgttcgtatttttttggcgtttgggaagt

SEQ ID NO: 3289 - DNA, 21 bp, Artificial Sequence
  Description of Artificial Sequence: Synthetic oligonucleotide
actccatataaacgaaccgaa

SEQ ID NO: 3290 - DNA, 22 bp, Artificial Sequence
  Description of Artificial Sequence: Synthetic oligonucleotide
tttgttaagcgttcgtcgttag

SEQ ID NO: 3291 - DNA, 21 bp, Artificial Sequence
  Description of Artificial Sequence: Synthetic oligonucleotide
gaaaacgaaaccgacttcaat

SEQ ID NO: 3292 - DNA, 20 bp, Artificial Sequence
  Description of Artificial Sequence: Synthetic oligonucleotide
gagcgaagtttgttaagcgt

SEQ ID NO: 3293 - DNA, 21 bp, Artificial Sequence
  Description of Artificial Sequence: Synthetic oligonucleotide
ccatataaacgaaccgaaaac

SEQ ID NO: 3294 - DNA, 32 bp, Artificial Sequence
  Description of Artificial Sequence: Synthetic oligonucleotide
aatggaggagttagcgtttattgaagtcggtt

SEQ ID NO: 3295 - DNA, 21 bp, Artificial Sequence
  Description of Artificial Sequence: Synthetic oligonucleotide
tttcgaggaatataggatcgc

SEQ ID NO: 3296 - DNA, 28 bp, Artificial Sequence
  Description of Artificial Sequence: Synthetic oligonucleotide
ggggtcgggtagcgggttattgagtatt

SEQ ID NO: 3297 - DNA, 22 bp, Artificial Sequence
  Description of Artificial Sequence: Synthetic oligonucleotide
gagttaaggcgtttcgtagttc

SEQ ID NO: 3298 - DNA, 20 bp, Artificial Sequence
  Description of Artificial Sequence: Synthetic oligonucleotide
cgactacctcttcccacgta

SEQ ID NO: 3299 - DNA, 34 bp, Artificial Sequence
  Description of Artificial Sequence: Synthetic oligonucleotide
ttcgtatttttttggcgtttgggaagtagtaggt

SEQ ID NO: 3300 - DNA, 21 bp, Artificial Sequence
  Description of Artificial Sequence: Synthetic oligonucleotide
cgaaaccgacttcaataaacg

SEQ ID NO: 3301 - DNA, 20 bp, Artificial Sequence
  Description of Artificial Sequence: Synthetic oligonucleotide
tacgtgggaagaggtagtcg

SEQ ID NO: 3302 - DNA, 22 bp, Artificial Sequence
  Description of Artificial Sequence: Synthetic oligonucleotide
aacgaacgaacccatctataac

SEQ ID NO: 3303 - DNA, 23 bp, Artificial Sequence
  Description of Artificial Sequence: Synthetic oligonucleotide
tgtaaggaggaggcggtcgcgga

SEQ ID NO: 3304 - DNA, 21 bp, Artificial Sequence
  Description of Artificial Sequence: Synthetic oligonucleotide
ttacgtgggaagaggtagtcg

SEQ ID NO: 3305 - DNA, 22 bp, Artificial Sequence
  Description of Artificial Sequence: Synthetic oligonucleotide
ttttcgaggaatataggatcgc

SEQ ID NO: 3306 - DNA, 21 bp, Artificial Sequence
  Description of Artificial Sequence: Synthetic oligonucleotide
tagagcgaagtttgttaagcg

SEQ ID NO: 3307 - DNA, 22 bp, Artificial Sequence
  Description of Artificial Sequence: Synthetic oligonucleotide
tagagcgaagtttgttaagcgt

SEQ ID NO: 3308 - DNA, 21 bp, Artificial Sequence
  Description of Artificial Sequence: Synthetic oligonucleotide
ggagagttaaggcgtttcgta

SEQ ID NO: 3309 - DNA, 21 bp, Artificial Sequence
  Description of Artificial Sequence: Synthetic oligonucleotide
taaccccgaacgaactaaaaa

SEQ ID NO: 3310 - DNA, 22 bp, Artificial Sequence
  Description of Artificial Sequence: Synthetic oligonucleotide
gagagttaaggcgtttcgtagt

SEQ ID NO: 3311 - DNA, 20 bp, Artificial Sequence
  Description of Artificial Sequence: Synthetic oligonucleotide
agcgaagtttgttaagcgtt

SEQ ID NO: 3312 - DNA, 21 bp, Artificial Sequence
  Description of Artificial Sequence: Synthetic oligonucleotide
tttgttaagcgttcgtcgtta

SEQ ID NO: 3313 - DNA, 22 bp, Artificial Sequence
  Description of Artificial Sequence: Synthetic oligonucleotide
acgaacgaacccatctataact

SEQ ID NO: 3314 - DNA, 21 bp, Artificial Sequence
  Description of Artificial Sequence: Synthetic oligonucleotide
acgaaaccgacttcaataaac

SEQ ID NO: 3315 - DNA, 21 bp, Artificial Sequence
  Description of Artificial Sequence: Synthetic oligonucleotide
tagacgagtggagttcgagga

SEQ ID NO: 3316 - DNA, 22 bp, Artificial Sequence
  Description of Artificial Sequence: Synthetic oligonucleotide
aaaatacgaacgacaaaactcg

SEQ ID NO: 3317 - DNA, 29 bp, Artificial Sequence
  Description of Artificial Sequence: Synthetic oligonucleotide
agggagagttaaggcgtttcgtagttcgg

SEQ ID NO: 3318 - DNA, 20 bp, Artificial Sequence
  Description of Artificial Sequence: Synthetic oligonucleotide
aaaccgacttcaataaacgc

SEQ ID NO: 3319 - DNA, 23 bp, Artificial Sequence
  Description of Artificial Sequence: Synthetic oligonucleotide
agagttaaggcgtttcgtagttc

SEQ ID NO: 3320 - DNA, 19 bp, Artificial Sequence
  Description of Artificial Sequence: Synthetic oligonucleotide
acgagtggagttcgaggag

SEQ ID NO: 3321 - DNA, 21 bp, Artificial Sequence
  Description of Artificial Sequence: Synthetic oligonucleotide
aaaccgacttcaataaacgct

SEQ ID NO: 3322 - DNA, 22 bp, Artificial Sequence
  Description of Artificial Sequence: Synthetic oligonucleotide
cctaacgaacgaacccatctat

SEQ ID NO: 3323 - DNA, 22 bp, Artificial Sequence
  Description of Artificial Sequence: Synthetic oligonucleotide
aggaggaggcggtcgcggaagt

SEQ ID NO: 3324 - DNA, 21 bp, Artificial Sequence
  Description of Artificial Sequence: Synthetic oligonucleotide
cgcacactcatataccattcg

SEQ ID NO: 3325 - DNA, 22 bp, Artificial Sequence
  Description of Artificial Sequence: Synthetic oligonucleotide
tatttagtcgcggttcgtattc

SEQ ID NO: 3326 - DNA, 33 bp, Artificial Sequence
  Description of Artificial Sequence: Synthetic oligonucleotide
tttcgttttcggtagggggcgttttggagcgga

SEQ ID NO: 3327 - DNA, 21 bp, Artificial Sequence
  Description of Artificial Sequence: Synthetic oligonucleotide
ctacactaccgcgaaaactcc

SEQ ID NO: 3328 - DNA, 22 bp, Artificial Sequence
  Description of Artificial Sequence: Synthetic oligonucleotide
cgggatgtttagtagttcgttg

SEQ ID NO: 3329 - DNA, 35 bp, Artificial Sequence
  Description of Artificial Sequence: Synthetic oligonucleotide
ttcggaagtcgtttgttgttgtagagttgtacgaa

SEQ ID NO: 3330 - DNA, 22 bp, Artificial Sequence
  Description of Artificial Sequence: Synthetic oligonucleotide
tcggagagacgttatttagtcg

SEQ ID NO: 3331 - DNA, 22 bp, Artificial Sequence
  Description of Artificial Sequence: Synthetic oligonucleotide
actacactaccgcgaaaactcc

SEQ ID NO: 3332 - DNA, 22 bp, Artificial Sequence
  Description of Artificial Sequence: Synthetic oligonucleotide
tgtttagtagttcgttgttcgg

SEQ ID NO: 3333 - DNA, 20 bp, Artificial Sequence
  Description of Artificial Sequence: Synthetic oligonucleotide
tacactaccgcgaaaactcc

SEQ ID NO: 3334 - DNA, 20 bp, Artificial Sequence
  Description of Artificial Sequence: Synthetic oligonucleotide
aacaaacgacttccgaaaaa

SEQ ID NO: 3335 - DNA, 22 bp, Artificial Sequence
  Description of Artificial Sequence: Synthetic oligonucleotide
gggtgttattgttatcgtcgtc

SEQ ID NO: 3336 - DNA, 31 bp, Artificial Sequence
  Description of Artificial Sequence: Synthetic oligonucleotide
gtcgtcgttcgcgggatgtttagtagttcgt

SEQ ID NO: 3337 - DNA, 21 bp, Artificial Sequence
  Description of Artificial Sequence: Synthetic oligonucleotide
agacgttatttagtcgcggtt

SEQ ID NO: 3338 - DNA, 23 bp, Artificial Sequence
  Description of Artificial Sequence: Synthetic oligonucleotide
atgtttagtagttcgttgttcgg

SEQ ID NO: 3339 - DNA, 21 bp, Artificial Sequence
  Description of Artificial Sequence: Synthetic oligonucleotide
gataacaataacacccgacga

SEQ ID NO: 3340 - DNA, 23 bp, Artificial Sequence
  Description of Artificial Sequence: Synthetic oligonucleotide
ttatggtagtagtttttcgcgtt

SEQ ID NO: 3341 - DNA, 34 bp, Artificial Sequence
  Description of Artificial Sequence: Synthetic oligonucleotide
ttcggcgtagttttttagcggacgattttttcgt

SEQ ID NO: 3342 - DNA, 21 bp, Artificial Sequence
  Description of Artificial Sequence: Synthetic oligonucleotide
atttagtcgcggttcgtattc

SEQ ID NO: 3343 - DNA, 21 bp, Artificial Sequence
  Description of Artificial Sequence: Synthetic oligonucleotide
gagacgttatttagtcgcggt

SEQ ID NO: 3344 - DNA, 23 bp, Artificial Sequence
  Description of Artificial Sequence: Synthetic oligonucleotide
tttagtagttcgttgttcggttt

SEQ ID NO: 3345 - DNA, 22 bp, Artificial Sequence
  Description of Artificial Sequence: Synthetic oligonucleotide
tatggtagtagtttttcgcgtt

SEQ ID NO: 3346 - DNA, 22 bp, Artificial Sequence
  Description of Artificial Sequence: Synthetic oligonucleotide
gcgggatgtttagtagttcgtt

SEQ ID NO: 3347 - DNA, 22 bp, Artificial Sequence
  Description of Artificial Sequence: Synthetic oligonucleotide
atttttagttcggagagacgtt

SEQ ID NO: 3348 - DNA, 22 bp, Artificial Sequence
  Description of Artificial Sequence: Synthetic oligonucleotide
tactacactaccgcgaaaactc

SEQ ID NO: 3349 - DNA, 22 bp, Artificial Sequence
  Description of Artificial Sequence: Synthetic oligonucleotide
tttagtagttcgttgttcggtt

SEQ ID NO: 3350 - DNA, 21 bp, Artificial Sequence
  Description of Artificial Sequence: Synthetic oligonucleotide
gacgttatttagtcgcggttc

SEQ ID NO: 3351 - DNA, 19 bp, Artificial Sequence
  Description of Artificial Sequence: Synthetic oligonucleotide
acactaccgcgaaaactcc

SEQ ID NO: 3352 - DNA, 22 bp, Artificial Sequence
  Description of Artificial Sequence: Synthetic oligonucleotide
ttagtagttcgttgttcggttt

SEQ ID NO: 3353 - DNA, 23 bp, Artificial Sequence
  Description of Artificial Sequence: Synthetic oligonucleotide
gtttagtagttcgttgttcggtt

SEQ ID NO: 3354 - DNA, 20 bp, Artificial Sequence
  Description of Artificial Sequence: Synthetic oligonucleotide
acaaacgacttccgaaaaac

SEQ ID NO: 3355 - DNA, 22 bp, Artificial Sequence
  Description of Artificial Sequence: Synthetic oligonucleotide
ttcgtcgggtgttattgttatc

SEQ ID NO: 3356 - DNA, 22 bp, Artificial Sequence
  Description of Artificial Sequence: Synthetic oligonucleotide
tttttagttcggagagacgtta

SEQ ID NO: 3357 - DNA, 21 bp, Artificial Sequence
  Description of Artificial Sequence: Synthetic oligonucleotide
tcgggtgttattgttatcgtc

SEQ ID NO: 3358 - DNA, 21 bp, Artificial Sequence
  Description of Artificial Sequence: Synthetic oligonucleotide
acaacaaacgacttccgaaaa

SEQ ID NO: 3359 - DNA, 20 bp, Artificial Sequence
  Description of Artificial Sequence: Synthetic oligonucleotide
tttagtcgcggttcgtattc

SEQ ID NO: 3360 - DNA, 22 bp, Artificial Sequence
  Description of Artificial Sequence: Synthetic oligonucleotide
aaacgctaacccgaataaaact

SEQ ID NO: 3361 - DNA, 19 bp, Artificial Sequence
  Description of Artificial Sequence: Synthetic oligonucleotide
ggatttcgttttcggtagg

SEQ ID NO: 3362 - DNA, 30 bp, Artificial Sequence
  Description of Artificial Sequence: Synthetic oligonucleotide
agtgaggcgaatggtatatgagtgtgcggg

SEQ ID NO: 3363 - DNA, 19 bp, Artificial Sequence
  Description of Artificial Sequence: Synthetic oligonucleotide
atttcgttttcggtagggg

SEQ ID NO: 3364 - DNA, 21 bp, Artificial Sequence
  Description of Artificial Sequence: Synthetic oligonucleotide
cgcgaaaaccacaaataaact

SEQ ID NO: 3365 - DNA, 21 bp, Artificial Sequence
  Description of Artificial Sequence: Synthetic oligonucleotide
cgaatggtatatgagtgtgcg

SEQ ID NO: 3366 - DNA, 34 bp, Artificial Sequence
  Description of Artificial Sequence: Synthetic oligonucleotide
ttcgtttagttttattcgggttagcgtttggcga

SEQ ID NO: 3367 - DNA, 20 bp, Artificial Sequence
  Description of Artificial Sequence: Synthetic oligonucleotide
caacaaacgacttccgaaaa

SEQ ID NO: 3368 - DNA, 22 bp, Artificial Sequence
  Description of Artificial Sequence: Synthetic oligonucleotide
caacgaactactaaacatcccg

SEQ ID NO: 3369 - DNA, 19 bp, Artificial Sequence
  Description of Artificial Sequence: Synthetic oligonucleotide
cgtttcggggttgagttta

SEQ ID NO: 3370 - DNA, 38 bp, Artificial Sequence
  Description of Artificial Sequence: Synthetic oligonucleotide
ttcgagattatgcgcgggtttggttgttgttttttcgt

SEQ ID NO: 3371 - DNA, 24 bp, Artificial Sequence
  Description of Artificial Sequence: Synthetic oligonucleotide
ttttagttcggagagacgttattt

SEQ ID NO: 3372 - DNA, 24 bp, Artificial Sequence
  Description of Artificial Sequence: Synthetic oligonucleotide
ttatttttagttcggagagacgtt

SEQ ID NO: 3373 - DNA, 21 bp, Artificial Sequence
  Description of Artificial Sequence: Synthetic oligonucleotide
cggagagacgttatttagtcg

SEQ ID NO: 3374 - DNA, 19 bp, Artificial Sequence
  Description of Artificial Sequence: Synthetic oligonucleotide
cctaccgaaaacgaaatcc

SEQ ID NO: 3375 - DNA, 22 bp, Artificial Sequence
  Description of Artificial Sequence: Synthetic oligonucleotide
gttacgcgcggaagaggggcgt

SEQ ID NO: 3376 - DNA, 19 bp, Artificial Sequence
  Description of Artificial Sequence: Synthetic oligonucleotide
ccctaccgaaaacgaaatc

SEQ ID NO: 3377 - DNA, 18 bp, Artificial Sequence
  Description of Artificial Sequence: Synthetic oligonucleotide
ggtttcggttcgaggttc

SEQ ID NO: 3378 - DNA, 22 bp, Artificial Sequence
  Description of Artificial Sequence: Synthetic oligonucleotide
actttactacaacgaaaacgcc

SEQ ID NO: 3379 - DNA, 35 bp, Artificial Sequence
  Description of Artificial Sequence: Synthetic oligonucleotide
gggtttaagacgatggtatggtttgtttcgttatt

SEQ ID NO: 3380 - DNA, 22 bp, Artificial Sequence
  Description of Artificial Sequence: Synthetic oligonucleotide
cgataatataacctactccgcc

SEQ ID NO: 3381 - DNA, 22 bp, Artificial Sequence
  Description of Artificial Sequence: Synthetic oligonucleotide
cgggaaagtaaagcgtattttt

SEQ ID NO: 3382 - DNA, 33 bp, Artificial Sequence
  Description of Artificial Sequence: Synthetic oligonucleotide
gtcgacgttatagaggaggagtttacgtgatgg

SEQ ID NO: 3383 - DNA, 23 bp, Artificial Sequence
  Description of Artificial Sequence: Synthetic oligonucleotide
acgataatataacctactccgcc

SEQ ID NO: 3384 - DNA, 21 bp, Artificial Sequence
  Description of Artificial Sequence: Synthetic oligonucleotide
tcgggaaagtaaagcgtattt

SEQ ID NO: 3385 - DNA, 21 bp, Artificial Sequence
  Description of Artificial Sequence: Synthetic oligonucleotide
ttcgggaaagtaaagcgtatt

SEQ ID NO: 3386 - DNA, 24 bp, Artificial Sequence
  Description of Artificial Sequence: Synthetic oligonucleotide
cgtaaactcctcctctataacgtc

SEQ ID NO: 3387 - DNA, 30 bp, Artificial Sequence
  Description of Artificial Sequence: Synthetic oligonucleotide
agaggtcgagttttgttatagcgaaggcgt

SEQ ID NO: 3388 - DNA, 24 bp, Artificial Sequence
  Description of Artificial Sequence: Synthetic oligonucleotide
cacgtaaactcctcctctataacg

SEQ ID NO: 3389 - DNA, 24 bp, Artificial Sequence
  Description of Artificial Sequence: Synthetic oligonucleotide
aaacgataatataacctactccgc

SEQ ID NO: 3390 - DNA, 24 bp, Artificial Sequence
  Description of Artificial Sequence: Synthetic oligonucleotide
aacgataatataacctactccgcc

SEQ ID NO: 3391 - DNA, 23 bp, Artificial Sequence
  Description of Artificial Sequence: Synthetic oligonucleotide
acgtaaactcctcctctataacg

SEQ ID NO: 3392 - DNA, 22 bp, Artificial Sequence
  Description of Artificial Sequence: Synthetic oligonucleotide
tcataaacaaaacgtctcgaat

SEQ ID NO: 3393 - DNA, 24 bp, Artificial Sequence
  Description of Artificial Sequence: Synthetic oligonucleotide
cgttatagaggaggagtttacgtg

SEQ ID NO: 3394 - DNA, 32 bp, Artificial Sequence
  Description of Artificial Sequence: Synthetic oligonucleotide
ggtggcggagtaggttatattatcgttttggg

SEQ ID NO: 3395 - DNA, 24 bp, Artificial Sequence
  Description of Artificial Sequence: Synthetic oligonucleotide
cataaacaaaacgtctcgaattta

SEQ ID NO: 3396 - DNA, 22 bp, Artificial Sequence
  Description of Artificial Sequence: Synthetic oligonucleotide
cgaaatcctcataaacaaaacg

SEQ ID NO: 3397 - DNA, 18 bp, Artificial Sequence
  Description of Artificial Sequence: Synthetic oligonucleotide
gtttacgtgatggtggcg

SEQ ID NO: 3398 - DNA, 26 bp, Artificial Sequence
  Description of Artificial Sequence: Synthetic oligonucleotide
atcgttttgggttcggggagggagag

SEQ ID NO: 3399 - DNA, 19 bp, Artificial Sequence
  Description of Artificial Sequence: Synthetic oligonucleotide
agtttacgtgatggtggcg

SEQ ID NO: 3400 - DNA, 18 bp, Artificial Sequence
  Description of Artificial Sequence: Synthetic oligonucleotide
cgccaccatcacgtaaac

SEQ ID NO: 3401 - DNA, 22 bp, Artificial Sequence
  Description of Artificial Sequence: Synthetic oligonucleotide
ctcataaacaaaacgtctcgaa

SEQ ID NO: 3402 - DNA, 25 bp, Artificial Sequence
  Description of Artificial Sequence: Synthetic oligonucleotide
acgttatagaggaggagtttacgtg

SEQ ID NO: 3403 - DNA, 21 bp, Artificial Sequence
  Description of Artificial Sequence: Synthetic oligonucleotide
ttcgtattcggggtaaaagtc

SEQ ID NO: 3404 - DNA, 22 bp, Artificial Sequence
  Description of Artificial Sequence: Synthetic oligonucleotide
aaacgtaaataacgcaaacacc

SEQ ID NO: 3405 - DNA, 25 bp, Artificial Sequence
  Description of Artificial Sequence: Synthetic oligonucleotide
gtagcgcgacggtttgtcgggtttt

SEQ ID NO: 3406 - DNA, 21 bp, Artificial Sequence
  Description of Artificial Sequence: Synthetic oligonucleotide
tttcgtattcggggtaaaagt

SEQ ID NO: 3407 - DNA, 25 bp, Artificial Sequence
  Description of Artificial Sequence: Synthetic oligonucleotide
gggaggatcgggattcgtagcgcga

SEQ ID NO: 3408 - DNA, 21 bp, Artificial Sequence
  Description of Artificial Sequence: Synthetic oligonucleotide
cggagtttttgtagtaggcgt

SEQ ID NO: 3409 - DNA, 22 bp, Artificial Sequence
  Description of Artificial Sequence: Synthetic oligonucleotide
aaaaatacttccaacgaaacga

SEQ ID NO: 3410 - DNA, 25 bp, Artificial Sequence
  Description of Artificial Sequence: Synthetic oligonucleotide
aacggaggtttcgggggagttggag

SEQ ID NO: 3411 - DNA, 22 bp, Artificial Sequence
  Description of Artificial Sequence: Synthetic oligonucleotide
cgatattcttcctcgctaaaaa

SEQ ID NO: 3412 - DNA, 27 bp, Artificial Sequence
  Description of Artificial Sequence: Synthetic oligonucleotide
ggagttggaggtttcggaagaggtcgt

SEQ ID NO: 3413 - DNA, 21 bp, Artificial Sequence
  Description of Artificial Sequence: Synthetic oligonucleotide
tcggagtttttgtagtaggcg

SEQ ID NO: 3414 - DNA, 22 bp, Artificial Sequence
  Description of Artificial Sequence: Synthetic oligonucleotide
gtgggtcgttttcgtttatatc

SEQ ID NO: 3415 - DNA, 20 bp, Artificial Sequence
  Description of Artificial Sequence: Synthetic oligonucleotide
cctcgctacctaactcacga

SEQ ID NO: 3416 - DNA, 30 bp, Artificial Sequence
  Description of Artificial Sequence: Synthetic oligonucleotide
ggggaacggggtttttcgtattttacgtgt

SEQ ID NO: 3417 - DNA, 20 bp, Artificial Sequence
  Description of Artificial Sequence: Synthetic oligonucleotide
gtattcggggtaaaagtcgg

SEQ ID NO: 3418 - DNA, 22 bp, Artificial Sequence
  Description of Artificial Sequence: Synthetic oligonucleotide
cctaaaacgtaaataacgcaaa

SEQ ID NO: 3419 - DNA, 22 bp, Artificial Sequence
  Description of Artificial Sequence: Synthetic oligonucleotide
ccctaaaacgtaaataacgcaa

SEQ ID NO: 3420 - DNA, 22 bp, Artificial Sequence
  Description of Artificial Sequence: Synthetic oligonucleotide
gggtttttcgtattttacgtgt

SEQ ID NO: 3421 - DNA, 20 bp, Artificial Sequence
  Description of Artificial Sequence: Synthetic oligonucleotide
ctaccgacgcgacctaacta

SEQ ID NO: 3422 - DNA, 25 bp, Artificial Sequence
  Description of Artificial Sequence: Synthetic oligonucleotide
aggtagcgagggtcgttttcgcgtt

SEQ ID NO: 3423 - DNA, 20 bp, Artificial Sequence
  Description of Artificial Sequence: Synthetic oligonucleotide
cgagttaaagcgaggttttg

SEQ ID NO: 3424 - DNA, 22 bp, Artificial Sequence
  Description of Artificial Sequence: Synthetic oligonucleotide
ctccgaaataccgataacctaa

SEQ ID NO: 3425 - DNA, 34 bp, Artificial Sequence
  Description of Artificial Sequence: Synthetic oligonucleotide
gtattcgggtatcgttattagagaacggttggtt

SEQ ID NO: 3426 - DNA, 22 bp, Artificial Sequence
  Description of Artificial Sequence: Synthetic oligonucleotide
aaaacgtaaataacgcaaacac

SEQ ID NO: 3427 - DNA, 21 bp, Artificial Sequence
  Description of Artificial Sequence: Synthetic oligonucleotide
ccgatattcttcctcgctaaa

SEQ ID NO: 3428 - DNA, 22 bp, Artificial Sequence
  Description of Artificial Sequence: Synthetic oligonucleotide
cgttgtagtttagttaggtcgc

SEQ ID NO: 3429 - DNA, 22 bp, Artificial Sequence
  Description of Artificial Sequence: Synthetic oligonucleotide
acttttaccccgaatacgaaaa

SEQ ID NO: 3430 - DNA, 27 bp, Artificial Sequence
  Description of Artificial Sequence: Synthetic oligonucleotide
ggcgcgcggggatttcgtttacgtcgt

SEQ ID NO: 3431 - DNA, 22 bp, Artificial Sequence
  Description of Artificial Sequence: Synthetic oligonucleotide
cttttaccccgaatacgaaaac

SEQ ID NO: 3432 - DNA, 22 bp, Artificial Sequence
  Description of Artificial Sequence: Synthetic oligonucleotide
ttgtagtttagttaggtcgcgt

SEQ ID NO: 3433 - DNA, 22 bp, Artificial Sequence
  Description of Artificial Sequence: Synthetic oligonucleotide
tttcgtattttacgtgttttgc

SEQ ID NO: 3434 - DNA, 20 bp, Artificial Sequence
  Description of Artificial Sequence: Synthetic oligonucleotide
cggagtttttgtagtaggcg

SEQ ID NO: 3435 - DNA, 22 bp, Artificial Sequence
  Description of Artificial Sequence: Synthetic oligonucleotide
aaaatacttccaacgaaacgac

SEQ ID NO: 3436 - DNA, 20 bp, Artificial Sequence
  Description of Artificial Sequence: Synthetic oligonucleotide
tagttaggtcgcgtcggtag

SEQ ID NO: 3437 - DNA, 21 bp, Artificial Sequence
  Description of Artificial Sequence: Synthetic oligonucleotide
acgtaaataacgcaaacaccc

SEQ ID NO: 3438 - DNA, 21 bp, Artificial Sequence
  Description of Artificial Sequence: Synthetic oligonucleotide
ttttaccccgaatacgaaaac

SEQ ID NO: 3439 - DNA, 22 bp, Artificial Sequence
  Description of Artificial Sequence: Synthetic oligonucleotide
cgcgttgtagtttagttaggtc

SEQ ID NO: 3440 - DNA, 20 bp, Artificial Sequence
  Description of Artificial Sequence: Synthetic oligonucleotide
gacggagattcgtttggatt

SEQ ID NO: 3441 - DNA, 22 bp, Artificial Sequence
  Description of Artificial Sequence: Synthetic oligonucleotide
aactccgaaataccgataacct

SEQ ID NO: 3442 - DNA, 23 bp, Artificial Sequence
  Description of Artificial Sequence: Synthetic oligonucleotide
gttgtagtttagttaggtcgcgt

SEQ ID NO: 3443 - DNA, 23 bp, Artificial Sequence
  Description of Artificial Sequence: Synthetic oligonucleotide
cgagttcggagtttttgtagtag

SEQ ID NO: 3444 - DNA, 21 bp, Artificial Sequence
  Description of Artificial Sequence: Synthetic oligonucleotide
gacttttaccccgaatacgaa

SEQ ID NO: 3445 - DNA, 22 bp, Artificial Sequence
  Description of Artificial Sequence: Synthetic oligonucleotide
gcgttgtagtttagttaggtcg

SEQ ID NO: 3446 - DNA, 21 bp, Artificial Sequence
  Description of Artificial Sequence: Synthetic oligonucleotide
cttttaccccgaatacgaaaa

SEQ ID NO: 3447 - DNA, 19 bp, Artificial Sequence
  Description of Artificial Sequence: Synthetic oligonucleotide
cgtgggaattttaagtcgg

SEQ ID NO: 3448 - DNA, 22 bp, Artificial Sequence
  Description of Artificial Sequence: Synthetic oligonucleotide
cgccgaaataccttacatctac

SEQ ID NO: 3449 - DNA, 24 bp, Artificial Sequence
  Description of Artificial Sequence: Synthetic oligonucleotide
ttcggacgttttcgcgcggtaggg

SEQ ID NO: 3450 - DNA, 20 bp, Artificial Sequence
  Description of Artificial Sequence: Synthetic oligonucleotide
cgacgcgacctaactaaact

SEQ ID NO: 3451 - DNA, 26 bp, Artificial Sequence
  Description of Artificial Sequence: Synthetic oligonucleotide
ttaggtagcgagggtcgttttcgcgt

SEQ ID NO: 3452 - DNA, 20 bp, Artificial Sequence
  Description of Artificial Sequence: Synthetic oligonucleotide
cgtaaataacgcaaacaccc

SEQ ID NO: 3453 - DNA, 23 bp, Artificial Sequence
  Description of Artificial Sequence: Synthetic oligonucleotide
tcgcgttgtagtttagttaggtc

SEQ ID NO: 3454 - DNA, 21 bp, Artificial Sequence
  Description of Artificial Sequence: Synthetic oligonucleotide
gaatacgaaaaccaccgaaaa

SEQ ID NO: 3455 - DNA, 22 bp, Artificial Sequence
  Description of Artificial Sequence: Synthetic oligonucleotide
cgttagttgaggtagtatcggc

SEQ ID NO: 3456 - DNA, 19 bp, Artificial Sequence
  Description of Artificial Sequence: Synthetic oligonucleotide
ataacgacgatccgctttc

SEQ ID NO: 3457 - DNA, 33 bp, Artificial Sequence
  Description of Artificial Sequence: Synthetic oligonucleotide
tttcggttttggttcgggagacgcggttcgtta

SEQ ID NO: 3458 - DNA, 22 bp, Artificial Sequence
  Description of Artificial Sequence: Synthetic oligonucleotide
aggttatcggtatttcggagtt

SEQ ID NO: 3459 - DNA, 19 bp, Artificial Sequence
  Description of Artificial Sequence: Synthetic oligonucleotide
cttctaacgaaccgcgtct

SEQ ID NO: 3460 - DNA, 30 bp, Artificial Sequence
  Description of Artificial Sequence: Synthetic oligonucleotide
ggttacgttagttgaggtagtatcggcggg

SEQ ID NO: 3461 - DNA, 20 bp, Artificial Sequence
  Description of Artificial Sequence: Synthetic oligonucleotide
taccgacgcgacctaactaa

SEQ ID NO: 3462 - DNA, 21 bp, Artificial Sequence
  Description of Artificial Sequence: Synthetic oligonucleotide
aacgtaaataacgcaaacacc

SEQ ID NO: 3463 - DNA, 20 bp, Artificial Sequence
  Description of Artificial Sequence: Synthetic oligonucleotide
gaacggggtttttcgtattt

SEQ ID NO: 3464 - DNA, 23 bp, Artificial Sequence
  Description of Artificial Sequence: Synthetic oligonucleotide
gacctaactaaactacaacgcga

SEQ ID NO: 3465 - DNA, 28 bp, Artificial Sequence
  Description of Artificial Sequence: Synthetic oligonucleotide
ttttcgtgagttaggtagcgagggtcgt

SEQ ID NO: 3466 - DNA, 20 bp, Artificial Sequence
  Description of Artificial Sequence: Synthetic oligonucleotide
gcgagttcggagtttttgta

SEQ ID NO: 3467 - DNA, 21 bp, Artificial Sequence
  Description of Artificial Sequence: Synthetic oligonucleotide
atacttccaacgaaacgacct

SEQ ID NO: 3468 - DNA, 33 bp, Artificial Sequence
  Description of Artificial Sequence: Synthetic oligonucleotide
aggcgtaattttttttagaaacggaggtttcgg

SEQ ID NO: 3469 - DNA, 22 bp, Artificial Sequence
  Description of Artificial Sequence: Synthetic oligonucleotide
gcgagttcggagtttttgtagt

SEQ ID NO: 3470 - DNA, 19 bp, Artificial Sequence
  Description of Artificial Sequence: Synthetic oligonucleotide
gcgtgggaattttaagtcg

SEQ ID NO: 3471 - DNA, 22 bp, Artificial Sequence
  Description of Artificial Sequence: Synthetic oligonucleotide
gaacggggtttttcgtatttta

SEQ ID NO: 3472 - DNA, 21 bp, Artificial Sequence
  Description of Artificial Sequence: Synthetic oligonucleotide
ttagttaggtcgcgtcggtag

SEQ ID NO: 3473 - DNA, 21 bp, Artificial Sequence
  Description of Artificial Sequence: Synthetic oligonucleotide
aacggggtttttcgtatttta

SEQ ID NO: 3474 - DNA, 23 bp, Artificial Sequence
  Description of Artificial Sequence: Synthetic oligonucleotide
ttttcgtattttacgtgttttgc

SEQ ID NO: 3475 - DNA, 20 bp, Artificial Sequence
  Description of Artificial Sequence: Synthetic oligonucleotide
tcgtattcggggtaaaagtc

SEQ ID NO: 3476 - DNA, 23 bp, Artificial Sequence
  Description of Artificial Sequence: Synthetic oligonucleotide
actccgaaataccgataacctaa

SEQ ID NO: 3477 - DNA, 22 bp, Artificial Sequence
  Description of Artificial Sequence: Synthetic oligonucleotide
ttcgcgttgtagtttagttagg

SEQ ID NO: 3478 - DNA, 23 bp, Artificial Sequence
  Description of Artificial Sequence: Synthetic oligonucleotide
gcgttgtagtttagttaggtcgc

SEQ ID NO: 3479 - DNA, 21 bp, Artificial Sequence
  Description of Artificial Sequence: Synthetic oligonucleotide
aatacttccaacgaaacgacc

SEQ ID NO: 3480 - DNA, 22 bp, Artificial Sequence
  Description of Artificial Sequence: Synthetic oligonucleotide
ggttatcggtatttcggagttt

SEQ ID NO: 3481 - DNA, 21 bp, Artificial Sequence
  Description of Artificial Sequence: Synthetic oligonucleotide
ggtcgttttcgtttatatcgg

SEQ ID NO: 3482 - DNA, 20 bp, Artificial Sequence
  Description of Artificial Sequence: Synthetic oligonucleotide
aaacccgatattcttcctcg

SEQ ID NO: 3483 - DNA, 19 bp, Artificial Sequence
  Description of Artificial Sequence: Synthetic oligonucleotide
tattcggggtaaaagtcgg

SEQ ID NO: 3484 - DNA, 20 bp, Artificial Sequence
  Description of Artificial Sequence: Synthetic oligonucleotide
agttaggtagcgagggtcgt

SEQ ID NO: 3485 - DNA, 21 bp, Artificial Sequence
  Description of Artificial Sequence: Synthetic oligonucleotide
gaaacgacgtaaacgaaatcc

SEQ ID NO: 3486 - DNA, 33 bp, Artificial Sequence
  Description of Artificial Sequence: Synthetic oligonucleotide
ttcgcgttgtagtttagttaggtcgcgtcggta

SEQ ID NO: 3487 - DNA, 20 bp, Artificial Sequence
  Description of Artificial Sequence: Synthetic oligonucleotide
cgtattcggggtaaaagtcg

SEQ ID NO: 3488 - DNA, 23 bp, Artificial Sequence
  Description of Artificial Sequence: Synthetic oligonucleotide
ctaaaacgtaaataacgcaaaca

SEQ ID NO: 3489 - DNA, 22 bp, Artificial Sequence
  Description of Artificial Sequence: Synthetic oligonucleotide
taaaacgtaaataacgcaaaca

SEQ ID NO: 3490 - DNA, 21 bp, Artificial Sequence
  Description of Artificial Sequence: Synthetic oligonucleotide
gtcgttttcgtttatatcggc

SEQ ID NO: 3491 - DNA, 20 bp, Artificial Sequence
  Description of Artificial Sequence: Synthetic oligonucleotide
acgaccctcgctacctaact

SEQ ID NO: 3492 - DNA, 20 bp, Artificial Sequence
  Description of Artificial Sequence: Synthetic oligonucleotide
gataacgacgatccgctttc

SEQ ID NO: 3493 - DNA, 21 bp, Artificial Sequence
  Description of Artificial Sequence: Synthetic oligonucleotide
tctaccgacgcgacctaacta

SEQ ID NO: 3494 - DNA, 22 bp, Artificial Sequence
  Description of Artificial Sequence: Synthetic oligonucleotide
tatcggtatttcggagtttagg

SEQ ID NO: 3495 - DNA, 22 bp, Artificial Sequence
  Description of Artificial Sequence: Synthetic oligonucleotide
ttaggttatcggtatttcggag

SEQ ID NO: 3496 - DNA, 22 bp, Artificial Sequence
  Description of Artificial Sequence: Synthetic oligonucleotide
ggggtttttcgtattttacgtg

SEQ ID NO: 3497 - DNA, 20 bp, Artificial Sequence
  Description of Artificial Sequence: Synthetic oligonucleotide
tcgtgagttaggtagcgagg

SEQ ID NO: 3498 - DNA, 33 bp, Artificial Sequence
  Description of Artificial Sequence: Synthetic oligonucleotide
ttttcgcgttgtagtttagttaggtcgcgtcgg

SEQ ID NO: 3499 - DNA, 21 bp, Artificial Sequence
  Description of Artificial Sequence: Synthetic oligonucleotide
tttagttaggtcgcgtcggta

SEQ ID NO: 3500 - DNA, 20 bp, Artificial Sequence
  Description of Artificial Sequence: Synthetic oligonucleotide
agttaaagcgaggttttgcg

SEQ ID NO: 3501 - DNA, 22 bp, Artificial Sequence
  Description of Artificial Sequence: Synthetic oligonucleotide
tccgaaataccgataacctaaa

SEQ ID NO: 3502 - DNA, 34 bp, Artificial Sequence
  Description of Artificial Sequence: Synthetic oligonucleotide
ttcgtattcgggtatcgttattagagaacggttg

SEQ ID NO: 3503 - DNA, 22 bp, Artificial Sequence
  Description of Artificial Sequence: Synthetic oligonucleotide
aaatacttccaacgaaacgacc

SEQ ID NO: 3504 - DNA, 19 bp, Artificial Sequence
  Description of Artificial Sequence: Synthetic oligonucleotide
gttaaagcgaggttttgcg

SEQ ID NO: 3505 - DNA, 20 bp, Artificial Sequence
  Description of Artificial Sequence: Synthetic oligonucleotide
ggatcgtcgttatcggattt

SEQ ID NO: 3506 - DNA, 21 bp, Artificial Sequence
  Description of Artificial Sequence: Synthetic oligonucleotide
cgaaaaacccgtctctctaac

SEQ ID NO: 3507 - DNA, 32 bp, Artificial Sequence
  Description of Artificial Sequence: Synthetic oligonucleotide
gttttttaggtatcgtcgttcgggaggagttg

SEQ ID NO: 3508 - DNA, 21 bp, Artificial Sequence
  Description of Artificial Sequence: Synthetic oligonucleotide
tcgtattttacgtgttttgcg

SEQ ID NO: 3509 - DNA, 19 bp, Artificial Sequence
  Description of Artificial Sequence: Synthetic oligonucleotide
ctttcgccgaccttctaac

SEQ ID NO: 3510 - DNA, 23 bp, Artificial Sequence
  Description of Artificial Sequence: Synthetic oligonucleotide
cctaaactccgaaataccgataa

SEQ ID NO: 3511 - DNA, 22 bp, Artificial Sequence
  Description of Artificial Sequence: Synthetic oligonucleotide
atacttccaacgaaacgacctc

SEQ ID NO: 3512 - DNA, 19 bp, Artificial Sequence
  Description of Artificial Sequence: Synthetic oligonucleotide
ggaacggggtttttcgtat

SEQ ID NO: 3513 - DNA, 22 bp, Artificial Sequence
  Description of Artificial Sequence: Synthetic oligonucleotide
cgacgcgacctaactaaactac

SEQ ID NO: 3514 - DNA, 19 bp, Artificial Sequence
  Description of Artificial Sequence: Synthetic oligonucleotide
agttaggtcgcgtcggtag

SEQ ID NO: 3515 - DNA, 19 bp, Artificial Sequence
  Description of Artificial Sequence: Synthetic oligonucleotide
gtaaaagtcgggaggatcg

SEQ ID NO: 3516 - DNA, 21 bp, Artificial Sequence
  Description of Artificial Sequence: Synthetic oligonucleotide
gggtcgttttcgtttatatcg

SEQ ID NO: 3517 - DNA, 21 bp, Artificial Sequence
  Description of Artificial Sequence: Synthetic oligonucleotide
cctcgctacctaactcacgaa

SEQ ID NO: 3518 - DNA, 22 bp, Artificial Sequence
  Description of Artificial Sequence: Synthetic oligonucleotide
cgacctaactaaactacaacgc

SEQ ID NO: 3519 - DNA, 22 bp, Artificial Sequence
  Description of Artificial Sequence: Synthetic oligonucleotide
gcgacctaactaaactacaacg

SEQ ID NO: 3520 - DNA, 22 bp, Artificial Sequence
  Description of Artificial Sequence: Synthetic oligonucleotide
acctaactaaactacaacgcga

SEQ ID NO: 3521 - DNA, 18 bp, Artificial Sequence
  Description of Artificial Sequence: Synthetic oligonucleotide
cgagtttgttttgagcgg

SEQ ID NO: 3522 - DNA, 22 bp, Artificial Sequence
  Description of Artificial Sequence: Synthetic oligonucleotide
cgccgatactacctcaactaac

SEQ ID NO: 3523 - DNA, 36 bp, Artificial Sequence
  Description of Artificial Sequence: Synthetic oligonucleotide
ttatcggtatttcggagtttagggtttagatttggt

SEQ ID NO: 3524 - DNA, 22 bp, Artificial Sequence
  Description of Artificial Sequence: Synthetic oligonucleotide
gccgatactacctcaactaacg

SEQ ID NO: 3525 - DNA, 18 bp, Artificial Sequence
  Description of Artificial Sequence: Synthetic oligonucleotide
cgaggttttgcgagtttg

SEQ ID NO: 3526 - DNA, 20 bp, Artificial Sequence
  Description of Artificial Sequence: Synthetic oligonucleotide
ttaccccgaatacgaaaacc

SEQ ID NO: 3527 - DNA, 22 bp, Artificial Sequence
  Description of Artificial Sequence: Synthetic oligonucleotide
cgaactcccctaaaacgtaaat

SEQ ID NO: 3528 - DNA, 22 bp, Artificial Sequence
  Description of Artificial Sequence: Synthetic oligonucleotide
aaaacgccgaaataccttacat

SEQ ID NO: 3529 - DNA, 19 bp, Artificial Sequence
  Description of Artificial Sequence: Synthetic oligonucleotide
acggagattcgtttggatt

SEQ ID NO: 3530 - DNA, 22 bp, Artificial Sequence
  Description of Artificial Sequence: Synthetic oligonucleotide
actccgaaataccgataaccta

SEQ ID NO: 3531 - DNA, 20 bp, Artificial Sequence
  Description of Artificial Sequence: Synthetic oligonucleotide
aaaaaccgaaacgacgtaaa

SEQ ID NO: 3532 - DNA, 24 bp, Artificial Sequence
  Description of Artificial Sequence: Synthetic oligonucleotide
aatttgtttcggcgcgcggggatt

SEQ ID NO: 3533 - DNA, 18 bp, Artificial Sequence
  Description of Artificial Sequence: Synthetic oligonucleotide
gcgagtttgttttgagcg

SEQ ID NO: 3534 - DNA, 21 bp, Artificial Sequence
  Description of Artificial Sequence: Synthetic oligonucleotide
ttcgtgagttaggtagcgagg

SEQ ID NO: 3535 - DNA, 22 bp, Artificial Sequence
  Description of Artificial Sequence: Synthetic oligonucleotide
aacgccgaaataccttacatct

SEQ ID NO: 3536 - DNA, 19 bp, Artificial Sequence
  Description of Artificial Sequence: Synthetic oligonucleotide
accgacgcgacctaactaa

SEQ ID NO: 3537 - DNA, 22 bp, Artificial Sequence
  Description of Artificial Sequence: Synthetic oligonucleotide
taggttatcggtatttcggagt

SEQ ID NO: 3538 - DNA, 19 bp, Artificial Sequence
  Description of Artificial Sequence: Synthetic oligonucleotide
aaagcggatcgtcgttatc

SEQ ID NO: 3539 - DNA, 29 bp, Artificial Sequence
  Description of Artificial Sequence: Synthetic oligonucleotide
tttaggtatcgtcgttcgggaggagttgg

SEQ ID NO: 3540 - DNA, 20 bp, Artificial Sequence
  Description of Artificial Sequence: Synthetic oligonucleotide
tcgttttcgtttatatcggc

SEQ ID NO: 3541 - DNA, 22 bp, Artificial Sequence
  Description of Artificial Sequence: Synthetic oligonucleotide
gtttaggttatcggtatttcgg

SEQ ID NO: 3542 - DNA, 22 bp, Artificial Sequence
  Description of Artificial Sequence: Synthetic oligonucleotide
ggtttaggttatcggtatttcg

SEQ ID NO: 3543 - DNA, 23 bp, Artificial Sequence
  Description of Artificial Sequence: Synthetic oligonucleotide
gggtttttcgtattttacgtgtt

SEQ ID NO: 3544 - DNA, 22 bp, Artificial Sequence
  Description of Artificial Sequence: Synthetic oligonucleotide
tttttagcgaggaagaatatcg

SEQ ID NO: 3545 - DNA, 19 bp, Artificial Sequence
  Description of Artificial Sequence: Synthetic oligonucleotide
ctccgtaaccaaccaaacg

SEQ ID NO: 3546 - DNA, 24 bp, Artificial Sequence
  Description of Artificial Sequence: Synthetic oligonucleotide
ttgggacggggtcgggtggttcgg

SEQ ID NO: 3547 - DNA, 21 bp, Artificial Sequence
  Description of Artificial Sequence: Synthetic oligonucleotide
tttcgtgagttaggtagcgag

SEQ ID NO: 3548 - DNA, 18 bp, Artificial Sequence
  Description of Artificial Sequence: Synthetic oligonucleotide
cggggattttagagtcgg

SEQ ID NO: 3549 - DNA, 22 bp, Artificial Sequence
  Description of Artificial Sequence: Synthetic oligonucleotide
acgatcaaacgacgaaataaac

SEQ ID NO: 3550 - DNA, 30 bp, Artificial Sequence
  Description of Artificial Sequence: Synthetic oligonucleotide
gtcgtttattgcgtacgcgcgggtttgcgg

SEQ ID NO: 3551 - DNA, 21 bp, Artificial Sequence
  Description of Artificial Sequence: Synthetic oligonucleotide
acgccgaaataccttacatct

SEQ ID NO: 3552 - DNA, 18 bp, Artificial Sequence
  Description of Artificial Sequence: Synthetic oligonucleotide
tccgtaaccaaccaaacg

SEQ ID NO: 3553 - DNA, 19 bp, Artificial Sequence
  Description of Artificial Sequence: Synthetic oligonucleotide
cggggattttagagtcggt

SEQ ID NO: 3554 - DNA, 22 bp, Artificial Sequence
  Description of Artificial Sequence: Synthetic oligonucleotide
cgatcaaacgacgaaataaact

SEQ ID NO: 3555 - DNA, 20 bp, Artificial Sequence
  Description of Artificial Sequence: Synthetic oligonucleotide
ccctcgctacctaactcacg

SEQ ID NO: 3556 - DNA, 21 bp, Artificial Sequence
  Description of Artificial Sequence: Synthetic oligonucleotide
aaacgccgaaataccttacat

SEQ ID NO: 3557 - DNA, 21 bp, Artificial Sequence
  Description of Artificial Sequence: Synthetic oligonucleotide
gagttaggtagcgagggtcgt

SEQ ID NO: 3558 - DNA, 18 bp, Artificial Sequence
  Description of Artificial Sequence: Synthetic oligonucleotide
taaagcgaggttttgcga

SEQ ID NO: 3559 - DNA, 21 bp, Artificial Sequence
  Description of Artificial Sequence: Synthetic oligonucleotide
tgggtcgttttcgtttatatc

SEQ ID NO: 3560 - DNA, 20 bp, Artificial Sequence
  Description of Artificial Sequence: Synthetic oligonucleotide
aacggggtttttcgtatttt

SEQ ID NO: 3561 - DNA, 20 bp, Artificial Sequence
  Description of Artificial Sequence: Synthetic oligonucleotide
cgaccctcgctacctaactc

SEQ ID NO: 3562 - DNA, 23 bp, Artificial Sequence
  Description of Artificial Sequence: Synthetic oligonucleotide
ggtttttcgtattttacgtgttt

SEQ ID NO: 3563 - DNA, 21 bp, Artificial Sequence
  Description of Artificial Sequence: Synthetic oligonucleotide
aacggttggtttaggttatcg

SEQ ID NO: 3564 - DNA, 21 bp, Artificial Sequence
  Description of Artificial Sequence: Synthetic oligonucleotide
aacgaccctcgctacctaact

SEQ ID NO: 3565 - DNA, 19 bp, Artificial Sequence
  Description of Artificial Sequence: Synthetic oligonucleotide
ctaccgacgcgacctaact

SEQ ID NO: 3566 - DNA, 19 bp, Artificial Sequence
  Description of Artificial Sequence: Synthetic oligonucleotide
ttttgcgcggtggtatagt

SEQ ID NO: 3567 - DNA, 24 bp, Artificial Sequence
  Description of Artificial Sequence: Synthetic oligonucleotide
agcggggtcgtagggttaaggggt

SEQ ID NO: 3568 - DNA, 20 bp, Artificial Sequence
  Description of Artificial Sequence: Synthetic oligonucleotide
ccgacttttaccccgaatac

SEQ ID NO: 3569 - DNA, 22 bp, Artificial Sequence
  Description of Artificial Sequence: Synthetic oligonucleotide
acgaactcccctaaaacgtaaa

SEQ ID NO: 3570 - DNA, 20 bp, Artificial Sequence
  Description of Artificial Sequence: Synthetic oligonucleotide
ccgacgcgacctaactaaac

SEQ ID NO: 3571 - DNA, 18 bp, Artificial Sequence
  Description of Artificial Sequence: Synthetic oligonucleotide
ggaggatcgggattcgta

SEQ ID NO: 3572 - DNA, 34 bp, Artificial Sequence
  Description of Artificial Sequence: Synthetic oligonucleotide
tgcgcggtggtatagtttgggttcgtttaagcgg

SEQ ID NO: 3573 - DNA, 20 bp, Artificial Sequence
  Description of Artificial Sequence: Synthetic oligonucleotide
tttaccccgaatacgaaaac

SEQ ID NO: 3574 - DNA, 18 bp, Artificial Sequence
  Description of Artificial Sequence: Synthetic oligonucleotide
aggatcgggattcgtagc

SEQ ID NO: 3575 - DNA, 18 bp, Artificial Sequence
  Description of Artificial Sequence: Synthetic oligonucleotide
ttaaagcgaggttttgcg

SEQ ID NO: 3576 - DNA, 20 bp, Artificial Sequence
  Description of Artificial Sequence: Synthetic oligonucleotide
ctcgctacctaactcacgaa

SEQ ID NO: 3577 - DNA, 18 bp, Artificial Sequence
  Description of Artificial Sequence: Synthetic oligonucleotide
gttcgtgaaattgcggtc

SEQ ID NO: 3578 - DNA, 22 bp, Artificial Sequence
  Description of Artificial Sequence: Synthetic oligonucleotide
ttaactcgaaatccaaacgaat

SEQ ID NO: 3579 - DNA, 34 bp, Artificial Sequence
  Description of Artificial Sequence: Synthetic oligonucleotide
ggtttatcgcgatggttttttcgatattttcgga

SEQ ID NO: 3580 - DNA, 19 bp, Artificial Sequence
  Description of Artificial Sequence: Synthetic oligonucleotide
ttatcgggttgatcggttt

SEQ ID NO: 3581 - DNA, 22 bp, Artificial Sequence
  Description of Artificial Sequence: Synthetic oligonucleotide
cgactctaaaatccccgaaata

SEQ ID NO: 3582 - DNA, 35 bp, Artificial Sequence
  Description of Artificial Sequence: Synthetic oligonucleotide
ggtttaggttcggtgagagattttatatagcggag

SEQ ID NO: 3583 - DNA, 19 bp, Artificial Sequence
  Description of Artificial Sequence: Synthetic oligonucleotide
tttatcgggttgatcggtt

SEQ ID NO: 3584 - DNA, 19 bp, Artificial Sequence
  Description of Artificial Sequence: Synthetic oligonucleotide
ttttatcgggttgatcggt

SEQ ID NO: 3585 - DNA, 18 bp, Artificial Sequence
  Description of Artificial Sequence: Synthetic oligonucleotide
aagcgaggttttgcgagt

SEQ ID NO: 3586 - DNA, 18 bp, Artificial Sequence
  Description of Artificial Sequence: Synthetic oligonucleotide
agcgaggttttgcgagtt

SEQ ID NO: 3587 - DNA, 21 bp, Artificial Sequence
  Description of Artificial Sequence: Synthetic oligonucleotide
tacttccaacgaaacgacctc

SEQ ID NO: 3588 - DNA, 21 bp, Artificial Sequence
  Description of Artificial Sequence: Synthetic oligonucleotide
aaaaacgccgaaataccttac

SEQ ID NO: 3589 - DNA, 21 bp, Artificial Sequence
  Description of Artificial Sequence: Synthetic oligonucleotide
accctaaactccgaaataccg

SEQ ID NO: 3590 - DNA, 18 bp, Artificial Sequence
  Description of Artificial Sequence: Synthetic oligonucleotide
taacgacgatccgctttc

SEQ ID NO: 3591 - DNA, 20 bp, Artificial Sequence
  Description of Artificial Sequence: Synthetic oligonucleotide
ctctaccgacgcgacctaac

SEQ ID NO: 3592 - DNA, 20 bp, Artificial Sequence
  Description of Artificial Sequence: Synthetic oligonucleotide
gaaagcggatcgtcgttatc

SEQ ID NO: 3593 - DNA, 20 bp, Artificial Sequence
  Description of Artificial Sequence: Synthetic oligonucleotide
tacttccaacgaaacgacct

SEQ ID NO: 3594 - DNA, 18 bp, Artificial Sequence
  Description of Artificial Sequence: Synthetic oligonucleotide
attcggggtaaaagtcgg

SEQ ID NO: 3595 - DNA, 20 bp, Artificial Sequence
  Description of Artificial Sequence: Synthetic oligonucleotide
gtttagttaggtcgcgtcgg

SEQ ID NO: 3596 - DNA, 20 bp, Artificial Sequence
  Description of Artificial Sequence: Synthetic oligonucleotide
cccgatattcttcctcgcta

SEQ ID NO: 3597 - DNA, 20 bp, Artificial Sequence
  Description of Artificial Sequence: Synthetic oligonucleotide
tttttatcgggttgatcggt

SEQ ID NO: 3598 - DNA, 23 bp, Artificial Sequence
  Description of Artificial Sequence: Synthetic oligonucleotide
ttatcggtatttcggagtttagg

SEQ ID NO: 3599 - DNA, 23 bp, Artificial Sequence
  Description of Artificial Sequence: Synthetic oligonucleotide
tttaggttatcggtatttcggag

SEQ ID NO: 3600 - DNA, 22 bp, Artificial Sequence
  Description of Artificial Sequence: Synthetic oligonucleotide
aacgatcaaacgacgaaataaa

SEQ ID NO: 3601 - DNA, 23 bp, Artificial Sequence
  Description of Artificial Sequence: Synthetic oligonucleotide
tttcgcgttgtagtttagttagg

SEQ ID NO: 3602 - DNA, 19 bp, Artificial Sequence
  Description of Artificial Sequence: Synthetic oligonucleotide
taccccgaatacgaaaacc

SEQ ID NO: 3603 - DNA, 23 bp, Artificial Sequence
  Description of Artificial Sequence: Synthetic oligonucleotide
tttttcgtattttacgtgttttg

SEQ ID NO: 3604 - DNA, 19 bp, Artificial Sequence
  Description of Artificial Sequence: Synthetic oligonucleotide
gaggatcgggattcgtagc

SEQ ID NO: 3605 - DNA, 19 bp, Artificial Sequence
  Description of Artificial Sequence: Synthetic oligonucleotide
gccgaccttctaacgaacc

SEQ ID NO: 3606 - DNA, 20 bp, Artificial Sequence
  Description of Artificial Sequence: Synthetic oligonucleotide
aaaaccgaaacgacgtaaac

SEQ ID NO: 3607 - DNA, 21 bp, Artificial Sequence
  Description of Artificial Sequence: Synthetic oligonucleotide
atcggtatttcggagtttagg

SEQ ID NO: 3608 - DNA, 22 bp, Artificial Sequence
  Description of Artificial Sequence: Synthetic oligonucleotide
cggattttagatcgttttgttt

SEQ ID NO: 3609 - DNA, 19 bp, Artificial Sequence
  Description of Artificial Sequence: Synthetic oligonucleotide
cgaaacctaacccttcgat

SEQ ID NO: 3610 - DNA, 35 bp, Artificial Sequence
  Description of Artificial Sequence: Synthetic oligonucleotide
gtcgttcgggaggagttggttagagagacgggttt

SEQ ID NO: 3611 - DNA, 19 bp, Artificial Sequence
  Description of Artificial Sequence: Synthetic oligonucleotide
ccgacgcgacctaactaaa

SEQ ID NO: 3612 - DNA, 19 bp, Artificial Sequence
  Description of Artificial Sequence: Synthetic oligonucleotide
gttaggtcgcgtcggtaga

SEQ ID NO: 3613 - DNA, 22 bp, Artificial Sequence
  Description of Artificial Sequence: Synthetic oligonucleotide
ctttaactcgaaatccaaacga

SEQ ID NO: 3614 - DNA, 20 bp, Artificial Sequence
  Description of Artificial Sequence: Synthetic oligonucleotide
ccctaaactccgaaataccg

SEQ ID NO: 3615 - DNA, 19 bp, Artificial Sequence
  Description of Artificial Sequence: Synthetic oligonucleotide
accttctaacgaaccgcgt

SEQ ID NO: 3616 - DNA, 23 bp, Artificial Sequence
  Description of Artificial Sequence: Synthetic oligonucleotide
gcgacctaactaaactacaacgc

SEQ ID NO: 3617 - DNA, 22 bp, Artificial Sequence
  Description of Artificial Sequence: Synthetic oligonucleotide
ctaaactccgaaataccgataa

SEQ ID NO: 3618 - DNA, 21 bp, Artificial Sequence
  Description of Artificial Sequence: Synthetic oligonucleotide
tccgaaataccgataacctaa

SEQ ID NO: 3619 - DNA, 18 bp, Artificial Sequence
  Description of Artificial Sequence: Synthetic oligonucleotide
gcgcggtggtatagtttg

SEQ ID NO: 3620 - DNA, 33 bp, Artificial Sequence
  Description of Artificial Sequence: Synthetic oligonucleotide
ggggtcgtagggttaaggggtgtttgcgttatt

SEQ ID NO: 3621 - DNA, 18 bp, Artificial Sequence
  Description of Artificial Sequence: Synthetic oligonucleotide
ttgcgcggtggtatagtt

SEQ ID NO: 3622 - DNA, 18 bp, Artificial Sequence
  Description of Artificial Sequence: Synthetic oligonucleotide
tttgcgcggtggtatagt

SEQ ID NO: 3623 - DNA, 19 bp, Artificial Sequence
  Description of Artificial Sequence: Synthetic oligonucleotide
tccaacgaaacgacctctt

SEQ ID NO: 3624 - DNA, 19 bp, Artificial Sequence
  Description of Artificial Sequence: Synthetic oligonucleotide
caacgaaacgacctcttcc

SEQ ID NO: 3625 - DNA, 19 bp, Artificial Sequence
  Description of Artificial Sequence: Synthetic oligonucleotide
ttccaacgaaacgacctct

SEQ ID NO: 3626 - DNA, 19 bp, Artificial Sequence
  Description of Artificial Sequence: Synthetic oligonucleotide
aggtagtatcggcgggaat

SEQ ID NO: 3627 - DNA, 21 bp, Artificial Sequence
  Description of Artificial Sequence: Synthetic oligonucleotide
acgatccttctcaaaaactcg

SEQ ID NO: 3628 - DNA, 32 bp, Artificial Sequence
  Description of Artificial Sequence: Synthetic oligonucleotide
gacgcggttcgttagaaggtcggcgaaagcgg

SEQ ID NO: 3629 - DNA, 20 bp, Artificial Sequence
  Description of Artificial Sequence: Synthetic oligonucleotide
cttccaacgaaacgacctct

SEQ ID NO: 3630 - DNA, 20 bp, Artificial Sequence
  Description of Artificial Sequence: Synthetic oligonucleotide
atacttccaacgaaacgacc

SEQ ID NO: 3631 - DNA, 18 bp, Artificial Sequence
  Description of Artificial Sequence: Synthetic oligonucleotide
agtttttggcgagttcgg

SEQ ID NO: 3632 - DNA, 22 bp, Artificial Sequence
  Description of Artificial Sequence: Synthetic oligonucleotide
ttttcgtgagttaggtagcgag

SEQ ID NO: 3633 - DNA, 18 bp, Artificial Sequence
  Description of Artificial Sequence: Synthetic oligonucleotide
ccgaaacgacgtaaacga

SEQ ID NO: 3634 - DNA, 20 bp, Artificial Sequence
  Description of Artificial Sequence: Synthetic oligonucleotide
aacgacgtaaacgaaatccc

SEQ ID NO: 3635 - DNA, 18 bp, Artificial Sequence
  Description of Artificial Sequence: Synthetic oligonucleotide
ccttctaacgaaccgcgt

SEQ ID NO: 3636 - DNA, 21 bp, Artificial Sequence
  Description of Artificial Sequence: Synthetic oligonucleotide
cgatattcttcctcgctaaaa

SEQ ID NO: 3637 - DNA, 19 bp, Artificial Sequence
  Description of Artificial Sequence: Synthetic oligonucleotide
ttaggtcgcgtcggtagag

SEQ ID NO: 3638 - DNA, 18 bp, Artificial Sequence
  Description of Artificial Sequence: Synthetic oligonucleotide
gcgaggttttgcgagttt

SEQ ID NO: 3639 - DNA, 23 bp, Artificial Sequence
  Description of Artificial Sequence: Synthetic oligonucleotide
acgttagttgaggtagtatcggc

SEQ ID NO: 3640 - DNA, 19 bp, Artificial Sequence
  Description of Artificial Sequence: Synthetic oligonucleotide
tttttgcgcggtggtatag

SEQ ID NO: 3641 - DNA, 22 bp, Artificial Sequence
  Description of Artificial Sequence: Synthetic oligonucleotide
taaactccgaaataccgataac

SEQ ID NO: 3642 - DNA, 18 bp, Artificial Sequence
  Description of Artificial Sequence: Synthetic oligonucleotide
cgcggtggtatagtttgg

SEQ ID NO: 3643 - DNA, 17 bp, Artificial Sequence
  Description of Artificial Sequence: Synthetic oligonucleotide
aaagcgaggttttgcga

SEQ ID NO: 3644 - DNA, 22 bp, Artificial Sequence
  Description of Artificial Sequence: Synthetic oligonucleotide
gttttcgtgagttaggtagcga

SEQ ID NO: 3645 - DNA, 19 bp, Artificial Sequence
  Description of Artificial Sequence: Synthetic oligonucleotide
cgccgaaacaaattaaaaa

SEQ ID NO: 3646 - DNA, 18 bp, Artificial Sequence
  Description of Artificial Sequence: Synthetic oligonucleotide
tacgtgttttgcgcgttt

SEQ ID NO: 3647 - DNA, 18 bp, Artificial Sequence
  Description of Artificial Sequence: Synthetic oligonucleotide
ttacgtgttttgcgcgtt

SEQ ID NO: 3648 - DNA, 33 bp, Artificial Sequence
  Description of Artificial Sequence: Synthetic oligonucleotide
ggcgtaattttttttagaaacggaggtttcggg

SEQ ID NO: 3649 - DNA, 20 bp, Artificial Sequence
  Description of Artificial Sequence: Synthetic oligonucleotide
cgtattttacgtgttttgcg

SEQ ID NO: 3650 - DNA, 19 bp, Artificial Sequence
  Description of Artificial Sequence: Synthetic oligonucleotide
cgtcggtagaggggatttt

SEQ ID NO: 3651 - DNA, 18 bp, Artificial Sequence
  Description of Artificial Sequence: Synthetic oligonucleotide
ttctaacgaaccgcgtct

SEQ ID NO: 3652 - DNA, 22 bp, Artificial Sequence
  Description of Artificial Sequence: Synthetic oligonucleotide
gttttcgtattcggggtaaaag

SEQ ID NO: 3653 - DNA, 19 bp, Artificial Sequence
  Description of Artificial Sequence: Synthetic oligonucleotide
actataccaccgcgcaaaa

SEQ ID NO: 3654 - DNA, 19 bp, Artificial Sequence
  Description of Artificial Sequence: Synthetic oligonucleotide
aactataccaccgcgcaaa

SEQ ID NO: 3655 - DNA, 19 bp, Artificial Sequence
  Description of Artificial Sequence: Synthetic oligonucleotide
aaactataccaccgcgcaa

SEQ ID NO: 3656 - DNA, 22 bp, Artificial Sequence
  Description of Artificial Sequence: Synthetic oligonucleotide
ttttcgtattcggggtaaaagt

SEQ ID NO: 3657 - DNA, 22 bp, Artificial Sequence
  Description of Artificial Sequence: Synthetic oligonucleotide
aaaacgataacctctctttcgc

SEQ ID NO: 3658 - DNA, 22 bp, Artificial Sequence
  Description of Artificial Sequence: Synthetic oligonucleotide
attttaggtcggttagttcggt

SEQ ID NO: 3659 - DNA, 26 bp, Artificial Sequence
  Description of Artificial Sequence: Synthetic oligonucleotide
ggcggggcggagatacgttttttcgt

SEQ ID NO: 3660 - DNA, 21 bp, Artificial Sequence
  Description of Artificial Sequence: Synthetic oligonucleotide
aaacgataacctctctttcgc

SEQ ID NO: 3661 - DNA, 22 bp, Artificial Sequence
  Description of Artificial Sequence: Synthetic oligonucleotide
aattttaggtcggttagttcgg

SEQ ID NO: 3662 - DNA, 22 bp, Artificial Sequence
  Description of Artificial Sequence: Synthetic oligonucleotide
gaattttaggtcggttagttcg

SEQ ID NO: 3663 - DNA, 21 bp, Artificial Sequence
  Description of Artificial Sequence: Synthetic oligonucleotide
acgcgaaattaaaacgaaatc

SEQ ID NO: 3664 - DNA, 39 bp, Artificial Sequence
  Description of Artificial Sequence: Synthetic oligonucleotide
ggcgtttttcgcgaaagagaggttatcgttttgtttcga

SEQ ID NO: 3665 - DNA, 21 bp, Artificial Sequence
  Description of Artificial Sequence: Synthetic oligonucleotide
ttttaggtcggttagttcggt

SEQ ID NO: 3666 - DNA, 21 bp, Artificial Sequence
  Description of Artificial Sequence: Synthetic oligonucleotide
attttaggtcggttagttcgg

SEQ ID NO: 3667 - DNA, 21 bp, Artificial Sequence
  Description of Artificial Sequence: Synthetic oligonucleotide
tttaggtcggttagttcggtg

SEQ ID NO: 3668 - DNA, 20 bp, Artificial Sequence
  Description of Artificial Sequence: Synthetic oligonucleotide
cgcgaaattaaaacgaaatc

SEQ ID NO: 3669 - DNA, 20 bp, Artificial Sequence
  Description of Artificial Sequence: Synthetic oligonucleotide
ttaggtcggttagttcggtg

SEQ ID NO: 3670 - DNA, 22 bp, Artificial Sequence
  Description of Artificial Sequence: Synthetic oligonucleotide
acgaaaccctacgaacctactt

SEQ ID NO: 3671 - DNA, 20 bp, Artificial Sequence
  Description of Artificial Sequence: Synthetic oligonucleotide
cgtcggtgttgttttagttg

SEQ ID NO: 3672 - DNA, 30 bp, Artificial Sequence
  Description of Artificial Sequence: Synthetic oligonucleotide
ttcggaatgtcgatggtttgggttagtcgt

SEQ ID NO: 3673 - DNA, 22 bp, Artificial Sequence
  Description of Artificial Sequence: Synthetic oligonucleotide
cacaatccgactaaaatacacg

SEQ ID NO: 3674 - DNA, 19 bp, Artificial Sequence
  Description of Artificial Sequence: Synthetic oligonucleotide
ggttatcgcggtgagtttc

SEQ ID NO: 3675 - DNA, 34 bp, Artificial Sequence
  Description of Artificial Sequence: Synthetic oligonucleotide
attttacggacggacgcgggtagagagaggtcgg

SEQ ID NO: 3676 - DNA, 20 bp, Artificial Sequence
  Description of Artificial Sequence: Synthetic oligonucleotide
aacgataacctctctttcgc

SEQ ID NO: 3677 - DNA, 22 bp, Artificial Sequence
  Description of Artificial Sequence: Synthetic oligonucleotide
cgaaaccctacgaacctacttt

SEQ ID NO: 3678 - DNA, 20 bp, Artificial Sequence
  Description of Artificial Sequence: Synthetic oligonucleotide
cctacgcgataacacaacct

SEQ ID NO: 3679 - DNA, 23 bp, Artificial Sequence
  Description of Artificial Sequence: Synthetic oligonucleotide
ttcggttttagttttattacgga

SEQ ID NO: 3680 - DNA, 37 bp, Artificial Sequence
  Description of Artificial Sequence: Synthetic oligonucleotide
taagtattttttggttttgcggtttcgtttgagcggg

SEQ ID NO: 3681 - DNA, 19 bp, Artificial Sequence
  Description of Artificial Sequence: Synthetic oligonucleotide
gtcggttagttcggtggag

SEQ ID NO: 3682 - DNA, 35 bp, Artificial Sequence
  Description of Artificial Sequence: Synthetic oligonucleotide
ggcggagatacgttttttcgtagttagttaggcgt

SEQ ID NO: 3683 - DNA, 20 bp, Artificial Sequence
  Description of Artificial Sequence: Synthetic oligonucleotide
cgcaatacacaatccgacta

SEQ ID NO: 3684 - DNA, 22 bp, Artificial Sequence
  Description of Artificial Sequence: Synthetic oligonucleotide
ggtgagtttcggtcgtaatttt

SEQ ID NO: 3685 - DNA, 25 bp, Artificial Sequence
  Description of Artificial Sequence: Synthetic oligonucleotide
agagagaggtcggcgggttttcgtg

SEQ ID NO: 3686 - DNA, 19 bp, Artificial Sequence
  Description of Artificial Sequence: Synthetic oligonucleotide
tttcggaatgtcgatggtt

SEQ ID NO: 3687 - DNA, 25 bp, Artificial Sequence
  Description of Artificial Sequence: Synthetic oligonucleotide
ggcgatgttcgggtacgggtttcgt

SEQ ID NO: 3688 - DNA, 21 bp, Artificial Sequence
  Description of Artificial Sequence: Synthetic oligonucleotide
cctacgcgataacacaaccta

SEQ ID NO: 3689 - DNA, 19 bp, Artificial Sequence
  Description of Artificial Sequence: Synthetic oligonucleotide
gggtttttacgtcgtttcg

SEQ ID NO: 3690 - DNA, 23 bp, Artificial Sequence
  Description of Artificial Sequence: Synthetic oligonucleotide
acacaatccgactaaaatacacg

SEQ ID NO: 3691 - DNA, 20 bp, Artificial Sequence
  Description of Artificial Sequence: Synthetic oligonucleotide
ttttaggtcggttagttcgg

SEQ ID NO: 3692 - DNA, 22 bp, Artificial Sequence
  Description of Artificial Sequence: Synthetic oligonucleotide
tcggttttagttttattacgga

SEQ ID NO: 3693 - DNA, 19 bp, Artificial Sequence
  Description of Artificial Sequence: Synthetic oligonucleotide
gtttttacgtcgtttcggc

SEQ ID NO: 3694 - DNA, 18 bp, Artificial Sequence
  Description of Artificial Sequence: Synthetic oligonucleotide
aacccgtacccgaacatc

SEQ ID NO: 3695 - DNA, 22 bp, Artificial Sequence
  Description of Artificial Sequence: Synthetic oligonucleotide
attttcgtcggtgttgttttag

SEQ ID NO: 3696 - DNA, 24 bp, Artificial Sequence
  Description of Artificial Sequence: Synthetic oligonucleotide
tttcggttttagttttattacgga

SEQ ID NO: 3697 - DNA, 18 bp, Artificial Sequence
  Description of Artificial Sequence: Synthetic oligonucleotide
aaaaccgcctcgctaaaa

SEQ ID NO: 3698 - DNA, 22 bp, Artificial Sequence
  Description of Artificial Sequence: Synthetic oligonucleotide
gagaggttatcgttttgtttcg

SEQ ID NO: 3699 - DNA, 33 bp, Artificial Sequence
  Description of Artificial Sequence: Synthetic oligonucleotide
agtagagttcggtattttttttcgttgaggggt

SEQ ID NO: 3700 - DNA, 22 bp, Artificial Sequence
  Description of Artificial Sequence: Synthetic oligonucleotide
acaatccgactaaaatacacga

SEQ ID NO: 3701 - DNA, 18 bp, Artificial Sequence
  Description of Artificial Sequence: Synthetic oligonucleotide
agggttatcgcggtgagt

SEQ ID NO: 3702 - DNA, 19 bp, Artificial Sequence
  Description of Artificial Sequence: Synthetic oligonucleotide
aaacccgtacccgaacatc

SEQ ID NO: 3703 - DNA, 19 bp, Artificial Sequence
  Description of Artificial Sequence: Synthetic oligonucleotide
gaaacccgtacccgaacat

SEQ ID NO: 3704 - DNA, 19 bp, Artificial Sequence
  Description of Artificial Sequence: Synthetic oligonucleotide
aaaaaccgcctcgctaaaa

SEQ ID NO: 3705 - DNA, 22 bp, Artificial Sequence
  Description of Artificial Sequence: Synthetic oligonucleotide
tttcgtcggtgttgttttagtt

SEQ ID NO: 3706 - DNA, 20 bp, Artificial Sequence
  Description of Artificial Sequence: Synthetic oligonucleotide
taggtcggttagttcggtgg

SEQ ID NO: 3707 - DNA, 18 bp, Artificial Sequence
  Description of Artificial Sequence: Synthetic oligonucleotide
ttcggaatgtcgatggtt

SEQ ID NO: 3708 - DNA, 18 bp, Artificial Sequence
  Description of Artificial Sequence: Synthetic oligonucleotide
aaacccgtacccgaacat

SEQ ID NO: 3709 - DNA, 22 bp, Artificial Sequence
  Description of Artificial Sequence: Synthetic oligonucleotide
ttttcgtcggtgttgttttagt

SEQ ID NO: 3710 - DNA, 22 bp, Artificial Sequence
  Description of Artificial Sequence: Synthetic oligonucleotide
tttggcgttatcgagatgttat

SEQ ID NO: 3711 - DNA, 23 bp, Artificial Sequence
  Description of Artificial Sequence: Synthetic oligonucleotide
cgaacactaaacgaaaaactacc

SEQ ID NO: 3712 - DNA, 45 bp, Artificial Sequence
  Description of Artificial Sequence: Synthetic oligonucleotide
tacgttttgcgagcgtttatcgagtgtgcgatttgtgggtttcga

SEQ ID NO: 3713 - DNA, 24 bp, Artificial Sequence
  Description of Artificial Sequence: Synthetic oligonucleotide
tcgaacactaaacgaaaaactacc

SEQ ID NO: 3714 - DNA, 21 bp, Artificial Sequence
  Description of Artificial Sequence: Synthetic oligonucleotide
ttggcgttatcgagatgttat

SEQ ID NO: 3715 - DNA, 23 bp, Artificial Sequence
  Description of Artificial Sequence: Synthetic oligonucleotide
tggcgttatcgagatgttattta

SEQ ID NO: 3716 - DNA, 28 bp, Artificial Sequence
  Description of Artificial Sequence: Synthetic oligonucleotide
agcgtttatcgagtgtgcgatttgtggg

SEQ ID NO: 3717 - DNA, 22 bp, Artificial Sequence
  Description of Artificial Sequence: Synthetic oligonucleotide
ggcgttatcgagatgttattta

SEQ ID NO: 3718 - DNA, 22 bp, Artificial Sequence
  Description of Artificial Sequence: Synthetic oligonucleotide
aaatctctctacgtcgtcctct

SEQ ID NO: 3719 - DNA, 22 bp, Artificial Sequence
  Description of Artificial Sequence: Synthetic oligonucleotide
tttttagttttcgaggtcggta

SEQ ID NO: 3720 - DNA, 32 bp, Artificial Sequence
  Description of Artificial Sequence: Synthetic oligonucleotide
tgtagtaggcggtaatagggataggtagacga

SEQ ID NO: 3721 - DNA, 22 bp, Artificial Sequence
  Description of Artificial Sequence: Synthetic oligonucleotide
ttagttttcgaggtcggtattg

SEQ ID NO: 3722 - DNA, 23 bp, Artificial Sequence
  Description of Artificial Sequence: Synthetic oligonucleotide
taaatctctctacgtcgtcctct

SEQ ID NO: 3723 - DNA, 22 bp, Artificial Sequence
  Description of Artificial Sequence: Synthetic oligonucleotide
ctctctacgtcgtcctctaacc

SEQ ID NO: 3724 - DNA, 21 bp, Artificial Sequence
  Description of Artificial Sequence: Synthetic oligonucleotide
gtcggtattggtttcgttgat

SEQ ID NO: 3725 - DNA, 22 bp, Artificial Sequence
  Description of Artificial Sequence: Synthetic oligonucleotide
tttagttttcgaggtcggtatt

SEQ ID NO: 3726 - DNA, 22 bp, Artificial Sequence
  Description of Artificial Sequence: Synthetic oligonucleotide
ttttagttttcgaggtcggtat

SEQ ID NO: 3727 - DNA, 21 bp, Artificial Sequence
  Description of Artificial Sequence: Synthetic oligonucleotide
cggtattggtttcgttgattt

SEQ ID NO: 3728 - DNA, 20 bp, Artificial Sequence
  Description of Artificial Sequence: Synthetic oligonucleotide
tcggtattggtttcgttgat

SEQ ID NO: 3729 - DNA, 21 bp, Artificial Sequence
  Description of Artificial Sequence: Synthetic oligonucleotide
ctctacgtcgtcctctaaccc

SEQ ID NO: 3730 - DNA, 24 bp, Artificial Sequence
  Description of Artificial Sequence: Synthetic oligonucleotide
ataaatctctctacgtcgtcctct

SEQ ID NO: 3731 - DNA, 20 bp, Artificial Sequence
  Description of Artificial Sequence: Synthetic oligonucleotide
aggtcggtattggtttcgtt

SEQ ID NO: 3732 - DNA, 22 bp, Artificial Sequence
  Description of Artificial Sequence: Synthetic oligonucleotide
taaaaccgacacgactaaccct

SEQ ID NO: 3733 - DNA, 22 bp, Artificial Sequence
  Description of Artificial Sequence: Synthetic oligonucleotide
agaggacgacgtagagagattt

SEQ ID NO: 3734 - DNA, 35 bp, Artificial Sequence
  Description of Artificial Sequence: Synthetic oligonucleotide
ttagagattttcggggagtgatagagttttcgttt

SEQ ID NO: 3735 - DNA, 22 bp, Artificial Sequence
  Description of Artificial Sequence: Synthetic oligonucleotide
tctctacgtcgtcctctaaccc

SEQ ID NO: 3736 - DNA, 20 bp, Artificial Sequence
  Description of Artificial Sequence: Synthetic oligonucleotide
gaggtcggtattggtttcgt

SEQ ID NO: 3737 - DNA, 21 bp, Artificial Sequence
  Description of Artificial Sequence: Synthetic oligonucleotide
tagttttcgaggtcggtattg

SEQ ID NO: 3738 - DNA, 19 bp, Artificial Sequence
  Description of Artificial Sequence: Synthetic oligonucleotide
cgaggtcggtattggtttc

SEQ ID NO: 3739 - DNA, 21 bp, Artificial Sequence
  Description of Artificial Sequence: Synthetic oligonucleotide
ttaaaaccgacacgactaacc

SEQ ID NO: 3740 - DNA, 23 bp, Artificial Sequence
  Description of Artificial Sequence: Synthetic oligonucleotide
tctctctacgtcgtcctctaacc

SEQ ID NO: 3741 - DNA, 24 bp, Artificial Sequence
  Description of Artificial Sequence: Synthetic oligonucleotide
tataaatctctctacgtcgtcctc

SEQ ID NO: 3742 - DNA, 24 bp, Artificial Sequence
  Description of Artificial Sequence: Synthetic oligonucleotide
ttagaggacgacgtagagagattt

SEQ ID NO: 3743 - DNA, 20 bp, Artificial Sequence
  Description of Artificial Sequence: Synthetic oligonucleotide
aaaccgacacgactaaccct

SEQ ID NO: 3744 - DNA, 25 bp, Artificial Sequence
  Description of Artificial Sequence: Synthetic oligonucleotide
tataaatctctctacgtcgtcctct

SEQ ID NO: 3745 - DNA, 26 bp, Artificial Sequence
  Description of Artificial Sequence: Synthetic oligonucleotide
aatataaatctctctacgtcgtcctc

SEQ ID NO: 3746 - DNA, 23 bp, Artificial Sequence
  Description of Artificial Sequence: Synthetic oligonucleotide
aatctctctacgtcgtcctctaa

SEQ ID NO: 3747 - DNA, 19 bp, Artificial Sequence
  Description of Artificial Sequence: Synthetic oligonucleotide
ggtcggtattggtttcgtt

SEQ ID NO: 3748 - DNA, 23 bp, Artificial Sequence
  Description of Artificial Sequence: Synthetic oligonucleotide
tagaggacgacgtagagagattt

SEQ ID NO: 3749 - DNA, 21 bp, Artificial Sequence
  Description of Artificial Sequence: Synthetic oligonucleotide
aacaatacgacgataaacgct

SEQ ID NO: 3750 - DNA, 21 bp, Artificial Sequence
  Description of Artificial Sequence: Synthetic oligonucleotide
gggttagtcgtgtcggtttta

SEQ ID NO: 3751 - DNA, 45 bp, Artificial Sequence
  Description of Artificial Sequence: Synthetic oligonucleotide
ttcggtaaggataaattaagtaattgtcgagataggtgttcgcgt

SEQ ID NO: 3752 - DNA, 22 bp, Artificial Sequence
  Description of Artificial Sequence: Synthetic oligonucleotide
gttagaggacgacgtagagaga

SEQ ID NO: 3753 - DNA, 20 bp, Artificial Sequence
  Description of Artificial Sequence: Synthetic oligonucleotide
ctacgtcgtcctctaacccc

SEQ ID NO: 3754 - DNA, 25 bp, Artificial Sequence
  Description of Artificial Sequence: Synthetic oligonucleotide
atataaatctctctacgtcgtcctc

SEQ ID NO: 3755 - DNA, 21 bp, Artificial Sequence
  Description of Artificial Sequence: Synthetic oligonucleotide
aaaaccgacacgactaaccct

SEQ ID NO: 3756 - DNA, 21 bp, Artificial Sequence
  Description of Artificial Sequence: Synthetic oligonucleotide
taaaaccgacacgactaaccc

SEQ ID NO: 3757 - DNA, 22 bp, Artificial Sequence
  Description of Artificial Sequence: Synthetic oligonucleotide
gaggacgacgtagagagattta

SEQ ID NO: 3758 - DNA, 19 bp, Artificial Sequence
  Description of Artificial Sequence: Synthetic oligonucleotide
ttcgaggtcggtattggtt

SEQ ID NO: 3759 - DNA, 19 bp, Artificial Sequence
  Description of Artificial Sequence: Synthetic oligonucleotide
tttcgaggtcggtattggt

SEQ ID NO: 3760 - DNA, 19 bp, Artificial Sequence
  Description of Artificial Sequence: Synthetic oligonucleotide
tcgaggtcggtattggttt

SEQ ID NO: 3761 - DNA, 22 bp, Artificial Sequence
  Description of Artificial Sequence: Synthetic oligonucleotide
tttttacggcgagtgttttaat

SEQ ID NO: 3762 - DNA, 21 bp, Artificial Sequence
  Description of Artificial Sequence: Synthetic oligonucleotide
aaaatcaacccgaatacgaac

SEQ ID NO: 3763 - DNA, 30 bp, Artificial Sequence
  Description of Artificial Sequence: Synthetic oligonucleotide
ttttggttatcgattcggatttcgcggagt

SEQ ID NO: 3764 - DNA, 20 bp, Artificial Sequence
  Description of Artificial Sequence: Synthetic oligonucleotide
ggtcgtagcgttgtgagaat

SEQ ID NO: 3765 - DNA, 22 bp, Artificial Sequence
  Description of Artificial Sequence: Synthetic oligonucleotide
acgaataaaaacaaactcaccg

SEQ ID NO: 3766 - DNA, 32 bp, Artificial Sequence
  Description of Artificial Sequence: Synthetic oligonucleotide
ttcggtttttatcgttgtgttcgggattgcga

SEQ ID NO: 3767 - DNA, 20 bp, Artificial Sequence
  Description of Artificial Sequence: Synthetic oligonucleotide
gggtttcgtgatttcgttta

SEQ ID NO: 3768 - DNA, 22 bp, Artificial Sequence
  Description of Artificial Sequence: Synthetic oligonucleotide
attaaaacactcgccgtaaaaa

SEQ ID NO: 3769 - DNA, 32 bp, Artificial Sequence
  Description of Artificial Sequence: Synthetic oligonucleotide
ttcgcgtattttagacgtgaacgagtgtttgg

SEQ ID NO: 3770 - DNA, 20 bp, Artificial Sequence
  Description of Artificial Sequence: Synthetic oligonucleotide
caaaatcaacccgaatacga

SEQ ID NO: 3771 - DNA, 22 bp, Artificial Sequence
  Description of Artificial Sequence: Synthetic oligonucleotide
gggtttcgtgatttcgtttaat

SEQ ID NO: 3772 - DNA, 21 bp, Artificial Sequence
  Description of Artificial Sequence: Synthetic oligonucleotide
ttaaaacactcgccgtaaaaa

SEQ ID NO: 3773 - DNA, 22 bp, Artificial Sequence
  Description of Artificial Sequence: Synthetic oligonucleotide
tttagacgtgaacgagtgtttg

SEQ ID NO: 3774 - DNA, 20 bp, Artificial Sequence
  Description of Artificial Sequence: Synthetic oligonucleotide
aatcaacccgaatacgaacc

SEQ ID NO: 3775 - DNA, 21 bp, Artificial Sequence
  Description of Artificial Sequence: Synthetic oligonucleotide
tagacgtgaacgagtgtttgg

SEQ ID NO: 3776 - DNA, 20 bp, Artificial Sequence
  Description of Artificial Sequence: Synthetic oligonucleotide
tagttttgtgcgggtcgtag

SEQ ID NO: 3777 - DNA, 21 bp, Artificial Sequence
  Description of Artificial Sequence: Synthetic oligonucleotide
ttttacggcgagtgttttaat

SEQ ID NO: 3778 - DNA, 23 bp, Artificial Sequence
  Description of Artificial Sequence: Synthetic oligonucleotide
tattaaaacactcgccgtaaaaa

SEQ ID NO: 3779 - DNA, 20 bp, Artificial Sequence
  Description of Artificial Sequence: Synthetic oligonucleotide
aaatcaacccgaatacgaac

SEQ ID NO: 3780 - DNA, 19 bp, Artificial Sequence
  Description of Artificial Sequence: Synthetic oligonucleotide
atcaacccgaatacgaacc

SEQ ID NO: 3781 - DNA, 21 bp, Artificial Sequence
  Description of Artificial Sequence: Synthetic oligonucleotide
tttttagacgtggacgaatgt

SEQ ID NO: 3782 - DNA, 20 bp, Artificial Sequence
  Description of Artificial Sequence: Synthetic oligonucleotide
aatcccgaacacaacgataa

SEQ ID NO: 3783 - DNA, 25 bp, Artificial Sequence
  Description of Artificial Sequence: Synthetic oligonucleotide
ttgtgcgggtcgtagcgttgtgaga

SEQ ID NO: 3784 - DNA, 21 bp, Artificial Sequence
  Description of Artificial Sequence: Synthetic oligonucleotide
cgaataaaaacaaactcaccg

SEQ ID NO: 3785 - DNA, 20 bp, Artificial Sequence
  Description of Artificial Sequence: Synthetic oligonucleotide
acgtgaacgagtgtttggag

SEQ ID NO: 3786 - DNA, 20 bp, Artificial Sequence
  Description of Artificial Sequence: Synthetic oligonucleotide
agacgtgaacgagtgtttgg

SEQ ID NO: 3787 - DNA, 19 bp, Artificial Sequence
  Description of Artificial Sequence: Synthetic oligonucleotide
gattttgggtattacgcgg

SEQ ID NO: 3788 - DNA, 22 bp, Artificial Sequence
  Description of Artificial Sequence: Synthetic oligonucleotide
cgttacaaacgctaacgaaaac

SEQ ID NO: 3789 - DNA, 39 bp, Artificial Sequence
  Description of Artificial Sequence: Synthetic oligonucleotide
ttcgagggtatttgtgacggtgagtttgtttttattcgt

SEQ ID NO: 3790 - DNA, 19 bp, Artificial Sequence
  Description of Artificial Sequence: Synthetic oligonucleotide
agttttgtgcgggtcgtag

SEQ ID NO: 3791 - DNA, 18 bp, Artificial Sequence
  Description of Artificial Sequence: Synthetic oligonucleotide
aggtcgggtttcgtgatt

SEQ ID NO: 3792 - DNA, 21 bp, Artificial Sequence
  Description of Artificial Sequence: Synthetic oligonucleotide
cgtcacaaataccctcgaaac

SEQ ID NO: 3793 - DNA, 19 bp, Artificial Sequence
  Description of Artificial Sequence: Synthetic oligonucleotide
cgtgaacgagtgtttggag

SEQ ID NO: 3794 - DNA, 20 bp, Artificial Sequence
  Description of Artificial Sequence: Synthetic oligonucleotide
cgtaatacccaaaatcgcaa

SEQ ID NO: 3795 - DNA, 42 bp, Artificial Sequence
  Description of Artificial Sequence: Synthetic oligonucleotide
tgcgggtcgtagcgttgtgagaattttttcggtttttatcgt

SEQ ID NO: 3796 - DNA, 19 bp, Artificial Sequence
  Description of Artificial Sequence: Synthetic oligonucleotide
gacgtgaacgagtgtttgg

SEQ ID NO: 3797 - DNA, 18 bp, Artificial Sequence
  Description of Artificial Sequence: Synthetic oligonucleotide
gaggtcgggtttcgtgat

SEQ ID NO: 3798 - DNA, 21 bp, Artificial Sequence
  Description of Artificial Sequence: Synthetic oligonucleotide
ggtttcgtgatttcgtttaat

SEQ ID NO: 3799 - DNA, 18 bp, Artificial Sequence
  Description of Artificial Sequence: Synthetic oligonucleotide
gttttgtgcgggtcgtag

SEQ ID NO: 3800 - DNA, 23 bp, Artificial Sequence
  Description of Artificial Sequence: Synthetic oligonucleotide
aacgaataaaaacaaactcaccg

SEQ ID NO: 3801 - DNA, 20 bp, Artificial Sequence
  Description of Artificial Sequence: Synthetic oligonucleotide
tcccgaacacaacgataaaa

SEQ ID NO: 3802 - DNA, 19 bp, Artificial Sequence
  Description of Artificial Sequence: Synthetic oligonucleotide
ccgcgtaatacccaaaatc

SEQ ID NO: 3803 - DNA, 24 bp, Artificial Sequence
  Description of Artificial Sequence: Synthetic oligonucleotide
atattaaaacactcgccgtaaaaa

SEQ ID NO: 3804 - DNA, 19 bp, Artificial Sequence
  Description of Artificial Sequence: Synthetic oligonucleotide
gcgtaatacccaaaatcgc

SEQ ID NO: 3805 - DNA, 20 bp, Artificial Sequence
  Description of Artificial Sequence: Synthetic oligonucleotide
ttttagacgtggacgaatgt

SEQ ID NO: 3806 - DNA, 22 bp, Artificial Sequence
  Description of Artificial Sequence: Synthetic oligonucleotide
acacaacgataaaaaccgaaaa

SEQ ID NO: 3807 - DNA, 22 bp, Artificial Sequence
  Description of Artificial Sequence: Synthetic oligonucleotide
aacacaacgataaaaaccgaaa

SEQ ID NO: 3808 - DNA, 21 bp, Artificial Sequence
  Description of Artificial Sequence: Synthetic oligonucleotide
gaatacgaaccgaaacaaaaa

SEQ ID NO: 3809 - DNA, 19 bp, Artificial Sequence
  Description of Artificial Sequence: Synthetic oligonucleotide
tagaatgttaggcggagcg

SEQ ID NO: 3810 - DNA, 22 bp, Artificial Sequence
  Description of Artificial Sequence: Synthetic oligonucleotide
cgaaaaacaaatacactcgaaa

SEQ ID NO: 3811 - DNA, 40 bp, Artificial Sequence
  Description of Artificial Sequence: Synthetic oligonucleotide
ttcggacgttttgtttcgtagacgttgacgagtgtagcga

SEQ ID NO: 3812 - DNA, 18 bp, Artificial Sequence
  Description of Artificial Sequence: Synthetic oligonucleotide
aacccgaatacgaaccga

SEQ ID NO: 3813 - DNA, 18 bp, Artificial Sequence
  Description of Artificial Sequence: Synthetic oligonucleotide
acccgaatacgaaccgaa

SEQ ID NO: 3814 - DNA, 20 bp, Artificial Sequence
  Description of Artificial Sequence: Synthetic oligonucleotide
ttatcgttgtgttcgggatt

SEQ ID NO: 3815 - DNA, 23 bp, Artificial Sequence
  Description of Artificial Sequence: Synthetic oligonucleotide
cgaataaaaacaaactcaccgtc

SEQ ID NO: 3816 - DNA, 26 bp, Artificial Sequence
  Description of Artificial Sequence: Synthetic oligonucleotide
ttgggtattacgcgggtttcgagggt

SEQ ID NO: 3817 - DNA, 20 bp, Artificial Sequence
  Description of Artificial Sequence: Synthetic oligonucleotide
tttatcgttgtgttcgggat

SEQ ID NO: 3818 - DNA, 22 bp, Artificial Sequence
  Description of Artificial Sequence: Synthetic oligonucleotide
ttttagacgtgaacgagtgttt

SEQ ID NO: 3819 - DNA, 20 bp, Artificial Sequence
  Description of Artificial Sequence: Synthetic oligonucleotide
cgaatacgaaccgaaacaaa

SEQ ID NO: 3820 - DNA, 17 bp, Artificial Sequence
  Description of Artificial Sequence: Synthetic oligonucleotide
cccgaatacgaaccgaa

SEQ ID NO: 3821 - DNA, 20 bp, Artificial Sequence
  Description of Artificial Sequence: Synthetic oligonucleotide
taaaacactcgccgtaaaaa

SEQ ID NO: 3822 - DNA, 19 bp, Artificial Sequence
  Description of Artificial Sequence: Synthetic oligonucleotide
gggtcgtagcgttgtgaga

SEQ ID NO: 3823 - DNA, 21 bp, Artificial Sequence
  Description of Artificial Sequence: Synthetic oligonucleotide
tagacgttgacgagtgtagcg

SEQ ID NO: 3824 - DNA, 20 bp, Artificial Sequence
  Description of Artificial Sequence: Synthetic oligonucleotide
aaaacgaaatccgaaccaac

SEQ ID NO: 3825 - DNA, 36 bp, Artificial Sequence
  Description of Artificial Sequence: Synthetic oligonucleotide
gagcggtatttgtattaatatcgacggttttttcga

SEQ ID NO: 3826 - DNA, 20 bp, Artificial Sequence
  Description of Artificial Sequence: Synthetic oligonucleotide
caatcccgaacacaacgata

SEQ ID NO: 3827 - DNA, 18 bp, Artificial Sequence
  Description of Artificial Sequence: Synthetic oligonucleotide
tcaacccgaatacgaacc

SEQ ID NO: 3828 - DNA, 21 bp, Artificial Sequence
  Description of Artificial Sequence: Synthetic oligonucleotide
gttcgtattcgggttgatttt

SEQ ID NO: 3829 - DNA, 19 bp, Artificial Sequence
  Description of Artificial Sequence: Synthetic oligonucleotide
actcgttttccccttttcg

SEQ ID NO: 3830 - DNA, 23 bp, Artificial Sequence
  Description of Artificial Sequence: Synthetic oligonucleotide
gggtaggaaaaggcgggacgggg

SEQ ID NO: 3831 - DNA, 22 bp, Artificial Sequence
  Description of Artificial Sequence: Synthetic oligonucleotide
ccgaaaaacaaatacactcgaa

SEQ ID NO: 3832 - DNA, 19 bp, Artificial Sequence
  Description of Artificial Sequence: Synthetic oligonucleotide
aaaaacgaaatccgaacca

SEQ ID NO: 3833 - DNA, 22 bp, Artificial Sequence
  Description of Artificial Sequence: Synthetic oligonucleotide
gcgtattttagacgtgaacgag

SEQ ID NO: 3834 - DNA, 18 bp, Artificial Sequence
  Description of Artificial Sequence: Synthetic oligonucleotide
aaaaactccgcgaaatcc

SEQ ID NO: 3835 - DNA, 35 bp, Artificial Sequence
  Description of Artificial Sequence: Synthetic oligonucleotide
tacggcgagtgttttaatattgacggtttttttgt

SEQ ID NO: 3836 - DNA, 21 bp, Artificial Sequence
  Description of Artificial Sequence: Synthetic oligonucleotide
ttagacgtgaacgagtgtttg

SEQ ID NO: 3837 - DNA, 18 bp, Artificial Sequence
  Description of Artificial Sequence: Synthetic oligonucleotide
ctcgttttccccttttcg

SEQ ID NO: 3838 - DNA, 22 bp, Artificial Sequence
  Description of Artificial Sequence: Synthetic oligonucleotide
gaacacaacgataaaaaccgaa

SEQ ID NO: 3839 - DNA, 22 bp, Artificial Sequence
  Description of Artificial Sequence: Synthetic oligonucleotide
cacaacgataaaaaccgaaaaa

SEQ ID NO: 3840 - DNA, 21 bp, Artificial Sequence
  Description of Artificial Sequence: Synthetic oligonucleotide
tacaaacgctaacgaaaacga

SEQ ID NO: 3841 - DNA, 35 bp, Artificial Sequence
  Description of Artificial Sequence: Synthetic oligonucleotide
gtgagaattttttcggtttttatcgttgtgttcgg

SEQ ID NO: 3842 - DNA, 19 bp, Artificial Sequence
  Description of Artificial Sequence: Synthetic oligonucleotide
acgaaacctctcaccgaaa

SEQ ID NO: 3843 - DNA, 49 bp, Artificial Sequence
  Description of Artificial Sequence: Synthetic oligonucleotide
ttaatatcgacggttttttcgagtgtatttgtttttcgggatatcgcgt

SEQ ID NO: 3844 - DNA, 22 bp, Artificial Sequence
  Description of Artificial Sequence: Synthetic oligonucleotide
aacgaaaaataaaccgaacctt

SEQ ID NO: 3845 - DNA, 22 bp, Artificial Sequence
  Description of Artificial Sequence: Synthetic oligonucleotide
agtcgtcggtgttggtatagat

SEQ ID NO: 3846 - DNA, 27 bp, Artificial Sequence
  Description of Artificial Sequence: Synthetic oligonucleotide
ttcgttaacgtttgcgggatagggcgt

SEQ ID NO: 3847 - DNA, 22 bp, Artificial Sequence
  Description of Artificial Sequence: Synthetic oligonucleotide
ctctcctcaaacgtaaacgaat

SEQ ID NO: 3848 - DNA, 22 bp, Artificial Sequence
  Description of Artificial Sequence: Synthetic oligonucleotide
tagtttcggatatagcggtagg

SEQ ID NO: 3849 - DNA, 27 bp, Artificial Sequence
  Description of Artificial Sequence: Synthetic oligonucleotide
agcgttgcgattcgtatagggttgggt

SEQ ID NO: 3850 - DNA, 22 bp, Artificial Sequence
  Description of Artificial Sequence: Synthetic oligonucleotide
ctctctcctcaaacgtaaacga

SEQ ID NO: 3851 - DNA, 22 bp, Artificial Sequence
  Description of Artificial Sequence: Synthetic oligonucleotide
ctcaaacgtaaacgaatatcgc

SEQ ID NO: 3852 - DNA, 22 bp, Artificial Sequence
  Description of Artificial Sequence: Synthetic oligonucleotide
gagtcgtcggtgttggtataga

SEQ ID NO: 3853 - DNA, 22 bp, Artificial Sequence
  Description of Artificial Sequence: Synthetic oligonucleotide
cgtaccctaaacgtaaacgaat

SEQ ID NO: 3854 - DNA, 22 bp, Artificial Sequence
  Description of Artificial Sequence: Synthetic oligonucleotide
acgaatcgaggtaagaggtttc

SEQ ID NO: 3855 - DNA, 44 bp, Artificial Sequence
  Description of Artificial Sequence: Synthetic oligonucleotide
gtcgttagtgttgaggtattcgtcgtgagggaagtagaaatcgt

SEQ ID NO: 3856 - DNA, 22 bp, Artificial Sequence
  Description of Artificial Sequence: Synthetic oligonucleotide
tctctcctcaaacgtaaacgaa

SEQ ID NO: 3857 - DNA, 22 bp, Artificial Sequence
  Description of Artificial Sequence: Synthetic oligonucleotide
tctacttccctcacgacgaata

SEQ ID NO: 3858 - DNA, 22 bp, Artificial Sequence
  Description of Artificial Sequence: Synthetic oligonucleotide
gttaggattagttcgggtacga

SEQ ID NO: 3859 - DNA, 25 bp, Artificial Sequence
  Description of Artificial Sequence: Synthetic oligonucleotide
ttcgcggggttcgggtcggtagtta

SEQ ID NO: 3860 - DNA, 22 bp, Artificial Sequence
  Description of Artificial Sequence: Synthetic oligonucleotide
tacgaatcgaggtaagaggttt

SEQ ID NO: 3861 - DNA, 21 bp, Artificial Sequence
  Description of Artificial Sequence: Synthetic oligonucleotide
ttcggatatagcggtaggagt

SEQ ID NO: 3862 - DNA, 21 bp, Artificial Sequence
  Description of Artificial Sequence: Synthetic oligonucleotide
tcaaacgtaaacgaatatcgc

SEQ ID NO: 3863 - DNA, 22 bp, Artificial Sequence
  Description of Artificial Sequence: Synthetic oligonucleotide
gtcgtcggtgttggtatagatg

SEQ ID NO: 3864 - DNA, 22 bp, Artificial Sequence
  Description of Artificial Sequence: Synthetic oligonucleotide
tcgtcggtgttggtatagatgt

SEQ ID NO: 3865 - DNA, 22 bp, Artificial Sequence
  Description of Artificial Sequence: Synthetic oligonucleotide
agtttcggatatagcggtagga

SEQ ID NO: 3866 - DNA, 22 bp, Artificial Sequence
  Description of Artificial Sequence: Synthetic oligonucleotide
tttcggatatagcggtaggagt

SEQ ID NO: 3867 - DNA, 22 bp, Artificial Sequence
  Description of Artificial Sequence: Synthetic oligonucleotide
gtttcggatatagcggtaggag

SEQ ID NO: 3868 - DNA, 21 bp, Artificial Sequence
  Description of Artificial Sequence: Synthetic oligonucleotide
cgaatcgaggtaagaggtttc

SEQ ID NO: 3869 - DNA, 23 bp, Artificial Sequence
  Description of Artificial Sequence: Synthetic oligonucleotide
gtacgaatcgaggtaagaggttt

SEQ ID NO: 3870 - DNA, 21 bp, Artificial Sequence
  Description of Artificial Sequence: Synthetic oligonucleotide
cgtcggtgttggtatagatgt

SEQ ID NO: 3871 - DNA, 21 bp, Artificial Sequence
  Description of Artificial Sequence: Synthetic oligonucleotide
cgtagtttcggatatagcggt

SEQ ID NO: 3872 - DNA, 23 bp, Artificial Sequence
  Description of Artificial Sequence: Synthetic oligonucleotide
gtagtttcggatatagcggtagg

SEQ ID NO: 3873 - DNA, 22 bp, Artificial Sequence
  Description of Artificial Sequence: Synthetic oligonucleotide
tctcctcaaacgtaaacgaata

SEQ ID NO: 3874 - DNA, 22 bp, Artificial Sequence
  Description of Artificial Sequence: Synthetic oligonucleotide
ggttaggattagttcgggtacg

SEQ ID NO: 3875 - DNA, 21 bp, Artificial Sequence
  Description of Artificial Sequence: Synthetic oligonucleotide
gtttcggatatagcggtagga

SEQ ID NO: 3876 - DNA, 21 bp, Artificial Sequence
  Description of Artificial Sequence: Synthetic oligonucleotide
acgatttctacttccctcacg

SEQ ID NO: 3877 - DNA, 22 bp, Artificial Sequence
  Description of Artificial Sequence: Synthetic oligonucleotide
cgctataaaaactctcccgact

SEQ ID NO: 3878 - DNA, 22 bp, Artificial Sequence
  Description of Artificial Sequence: Synthetic oligonucleotide
tttagtatcgcgttgtaagcgt

SEQ ID NO: 3879 - DNA, 29 bp, Artificial Sequence
  Description of Artificial Sequence: Synthetic oligonucleotide
ttcggggttcgcgtggtatttaggatcgt

SEQ ID NO: 3880 - DNA, 20 bp, Artificial Sequence
  Description of Artificial Sequence: Synthetic oligonucleotide
aaaaccgaatcccgtaactc

SEQ ID NO: 3881 - DNA, 22 bp, Artificial Sequence
  Description of Artificial Sequence: Synthetic oligonucleotide
gtattcgtcgtgagggaagtag

SEQ ID NO: 3882 - DNA, 49 bp, Artificial Sequence
  Description of Artificial Sequence: Synthetic oligonucleotide
aaatcgttttttaggtattcgtttacgtttagggtacgcgggagattgg

SEQ ID NO: 3883 - DNA, 21 bp, Artificial Sequence
  Description of Artificial Sequence: Synthetic oligonucleotide
tttcggatatagcggtaggag

SEQ ID NO: 3884 - DNA, 21 bp, Artificial Sequence
  Description of Artificial Sequence: Synthetic oligonucleotide
ttagtatcgcgttgtaagcgt

SEQ ID NO: 3885 - DNA, 22 bp, Artificial Sequence
  Description of Artificial Sequence: Synthetic oligonucleotide
ctacttccctcacgacgaatac

SEQ ID NO: 3886 - DNA, 20 bp, Artificial Sequence
  Description of Artificial Sequence: Synthetic oligonucleotide
tagttcgggtacgaatcgag

SEQ ID NO: 3887 - DNA, 22 bp, Artificial Sequence
  Description of Artificial Sequence: Synthetic oligonucleotide
aacgatttctacttccctcacg

SEQ ID NO: 3888 - DNA, 21 bp, Artificial Sequence
  Description of Artificial Sequence: Synthetic oligonucleotide
ttagttcgggtacgaatcgag

SEQ ID NO: 3889 - DNA, 21 bp, Artificial Sequence
  Description of Artificial Sequence: Synthetic oligonucleotide
acgaaaaataaaccgaacctt

SEQ ID NO: 3890 - DNA, 21 bp, Artificial Sequence
  Description of Artificial Sequence: Synthetic oligonucleotide
aaaaaccgaatcccgtaactc

SEQ ID NO: 3891 - DNA, 20 bp, Artificial Sequence
  Description of Artificial Sequence: Synthetic oligonucleotide
atatagcggtaggagtcggg

SEQ ID NO: 3892 - DNA, 21 bp, Artificial Sequence
  Description of Artificial Sequence: Synthetic oligonucleotide
ctacttccctcacgacgaata

SEQ ID NO: 3893 - DNA, 22 bp, Artificial Sequence
  Description of Artificial Sequence: Synthetic oligonucleotide
cacgacgaatacctcaacacta

SEQ ID NO: 3894 - DNA, 21 bp, Artificial Sequence
  Description of Artificial Sequence: Synthetic oligonucleotide
ttaggattagttcgggtacga

SEQ ID NO: 3895 - DNA, 23 bp, Artificial Sequence
  Description of Artificial Sequence: Synthetic oligonucleotide
aaacgaaaaataaaccgaacctt

SEQ ID NO: 3896 - DNA, 22 bp, Artificial Sequence
  Description of Artificial Sequence: Synthetic oligonucleotide
accctaaacgtaaacgaatacc

SEQ ID NO: 3897 - DNA, 21 bp, Artificial Sequence
  Description of Artificial Sequence: Synthetic oligonucleotide
ggtacgaatcgaggtaagagg

SEQ ID NO: 3898 - DNA, 21 bp, Artificial Sequence
  Description of Artificial Sequence: Synthetic oligonucleotide
gggtacgaatcgaggtaagag

SEQ ID NO: 3899 - DNA, 24 bp, Artificial Sequence
  Description of Artificial Sequence: Synthetic oligonucleotide
ccctaaacgtaaacgaatacctaa

SEQ ID NO: 3900 - DNA, 22 bp, Artificial Sequence
  Description of Artificial Sequence: Synthetic oligonucleotide
ggtacgaatcgaggtaagaggt

SEQ ID NO: 3901 - DNA, 22 bp, Artificial Sequence
  Description of Artificial Sequence: Synthetic oligonucleotide
tattcgtcgtgagggaagtaga

SEQ ID NO: 3902 - DNA, 21 bp, Artificial Sequence
  Description of Artificial Sequence: Synthetic oligonucleotide
cgatttctacttccctcacga

SEQ ID NO: 3903 - DNA, 21 bp, Artificial Sequence
  Description of Artificial Sequence: Synthetic oligonucleotide
gcgtaccctaaacgtaaacga

SEQ ID NO: 3904 - DNA, 20 bp, Artificial Sequence
  Description of Artificial Sequence: Synthetic oligonucleotide
atcgaggtaagaggtttcgc

SEQ ID NO: 3905 - DNA, 23 bp, Artificial Sequence
  Description of Artificial Sequence: Synthetic oligonucleotide
ctcctcaaacgtaaacgaatatc

SEQ ID NO: 3906 - DNA, 22 bp, Artificial Sequence
  Description of Artificial Sequence: Synthetic oligonucleotide
tcctcaaacgtaaacgaatatc

SEQ ID NO: 3907 - DNA, 20 bp, Artificial Sequence
  Description of Artificial Sequence: Synthetic oligonucleotide
ttctacttccctcacgacga

SEQ ID NO: 3908 - DNA, 19 bp, Artificial Sequence
  Description of Artificial Sequence: Synthetic oligonucleotide
aactacgcgccaaactacc

SEQ ID NO: 3909 - DNA, 22 bp, Artificial Sequence
  Description of Artificial Sequence: Synthetic oligonucleotide
ttatagcgttttggtttcgttt

SEQ ID NO: 3910 - DNA, 30 bp, Artificial Sequence
  Description of Artificial Sequence: Synthetic oligonucleotide
tgcgtagggttcgggtcgattcgacggcgt

SEQ ID NO: 3911 - DNA, 20 bp, Artificial Sequence
  Description of Artificial Sequence: Synthetic oligonucleotide
cggtgtttcggaggatagat

SEQ ID NO: 3912 - DNA, 29 bp, Artificial Sequence
  Description of Artificial Sequence: Synthetic oligonucleotide
ggagtcgtcggtgttggtatagatgtcgt

SEQ ID NO: 3913 - DNA, 28 bp, Artificial Sequence
  Description of Artificial Sequence: Synthetic oligonucleotide
ttcgtttacgtttagggtacgcgggaga

SEQ ID NO: 3914 - DNA, 21 bp, Artificial Sequence
  Description of Artificial Sequence: Synthetic oligonucleotide
aatcgaggtaagaggtttcgc

SEQ ID NO: 3915 - DNA, 19 bp, Artificial Sequence
  Description of Artificial Sequence: Synthetic oligonucleotide
agttcgggtacgaatcgag

SEQ ID NO: 3916 - DNA, 22 bp, Artificial Sequence
  Description of Artificial Sequence: Synthetic oligonucleotide
atctataccaacaccgacgact

SEQ ID NO: 3917 - DNA, 19 bp, Artificial Sequence
  Description of Artificial Sequence: Synthetic oligonucleotide
tatcgaggtaggaggcgag

SEQ ID NO: 3918 - DNA, 24 bp, Artificial Sequence
  Description of Artificial Sequence: Synthetic oligonucleotide
gggttagcgcggtgtttcggagga

SEQ ID NO: 3919 - DNA, 21 bp, Artificial Sequence
  Description of Artificial Sequence: Synthetic oligonucleotide
cgtgagggaagtagaaatcgt

SEQ ID NO: 3920 - DNA, 21 bp, Artificial Sequence
  Description of Artificial Sequence: Synthetic oligonucleotide
cgtcgtgagggaagtagaaat

SEQ ID NO: 3921 - DNA, 21 bp, Artificial Sequence
  Description of Artificial Sequence: Synthetic oligonucleotide
gatatagcggtaggagtcggg

SEQ ID NO: 3922 - DNA, 21 bp, Artificial Sequence
  Description of Artificial Sequence: Synthetic oligonucleotide
ggatatagcggtaggagtcgg

SEQ ID NO: 3923 - DNA, 22 bp, Artificial Sequence
  Description of Artificial Sequence: Synthetic oligonucleotide
tatacgaatcgcaacgctataa

SEQ ID NO: 3924 - DNA, 19 bp, Artificial Sequence
  Description of Artificial Sequence: Synthetic oligonucleotide
ggttcgcgtggtatttagg

SEQ ID NO: 3925 - DNA, 28 bp, Artificial Sequence
  Description of Artificial Sequence: Synthetic oligonucleotide
ttcggatatagcggtaggagtcgggaga

SEQ ID NO: 3926 - DNA, 23 bp, Artificial Sequence
  Description of Artificial Sequence: Synthetic oligonucleotide
gacgaatacctcaacactaacga

SEQ ID NO: 3927 - DNA, 21 bp, Artificial Sequence
  Description of Artificial Sequence: Synthetic oligonucleotide
cgacctctctcctcaaacgta

SEQ ID NO: 3928 - DNA, 21 bp, Artificial Sequence
  Description of Artificial Sequence: Synthetic oligonucleotide
atcgttataggtgttttcggg

SEQ ID NO: 3929 - DNA, 31 bp, Artificial Sequence
  Description of Artificial Sequence: Synthetic oligonucleotide
ttcgcgtggtatttaggatcgtagtttcgga

SEQ ID NO: 3930 - DNA, 21 bp, Artificial Sequence
  Description of Artificial Sequence: Synthetic oligonucleotide
tttctacttccctcacgacga

SEQ ID NO: 3931 - DNA, 19 bp, Artificial Sequence
  Description of Artificial Sequence: Synthetic oligonucleotide
gggttcgcgtggtatttag

SEQ ID NO: 3932 - DNA, 32 bp, Artificial Sequence
  Description of Artificial Sequence: Synthetic oligonucleotide
agcggtaggagtcgggagagtttttatagcgt

SEQ ID NO: 3933 - DNA, 20 bp, Artificial Sequence
  Description of Artificial Sequence: Synthetic oligonucleotide
gttcgcgtggtatttaggat

SEQ ID NO: 3934 - DNA, 19 bp, Artificial Sequence
  Description of Artificial Sequence: Synthetic oligonucleotide
tatagcggtaggagtcggg

SEQ ID NO: 3935 - DNA, 23 bp, Artificial Sequence
  Description of Artificial Sequence: Synthetic oligonucleotide
cgaatacctcaacactaacgact

SEQ ID NO: 3936 - DNA, 23 bp, Artificial Sequence
  Description of Artificial Sequence: Synthetic oligonucleotide
taccctaaacgtaaacgaatacc

SEQ ID NO: 3937 - DNA, 19 bp, Artificial Sequence
  Description of Artificial Sequence: Synthetic oligonucleotide
tcgaggtaagaggtttcgc

SEQ ID NO: 3938 - DNA, 22 bp, Artificial Sequence
  Description of Artificial Sequence: Synthetic oligonucleotide
acgaatacctcaacactaacga

SEQ ID NO: 3939 - DNA, 22 bp, Artificial Sequence
  Description of Artificial Sequence: Synthetic oligonucleotide
cgacgaatacctcaacactaac

SEQ ID NO: 3940 - DNA, 22 bp, Artificial Sequence
  Description of Artificial Sequence: Synthetic oligonucleotide
acgacgaatacctcaacactaa

SEQ ID NO: 3941 - DNA, 19 bp, Artificial Sequence
  Description of Artificial Sequence: Synthetic oligonucleotide
cgggtacgaatcgaggtaa

SEQ ID NO: 3942 - DNA, 20 bp, Artificial Sequence
  Description of Artificial Sequence: Synthetic oligonucleotide
cgttgtaagcgttagcgaag

SEQ ID NO: 3943 - DNA, 19 bp, Artificial Sequence
  Description of Artificial Sequence: Synthetic oligonucleotide
ttatcgaggtaggaggcga

SEQ ID NO: 3944 - DNA, 24 bp, Artificial Sequence
  Description of Artificial Sequence: Synthetic oligonucleotide
gtaccctaaacgtaaacgaatacc

SEQ ID NO: 3945 - DNA, 22 bp, Artificial Sequence
  Description of Artificial Sequence: Synthetic oligonucleotide
gctatatccgaaactacgatcc

SEQ ID NO: 3946 - DNA, 29 bp, Artificial Sequence
  Description of Artificial Sequence: Synthetic oligonucleotide
atcgttataggtgttttcggggttcgcgt

SEQ ID NO: 3947 - DNA, 20 bp, Artificial Sequence
  Description of Artificial Sequence: Synthetic oligonucleotide
ttcggatatagcggtaggag

SEQ ID NO: 3948 - DNA, 21 bp, Artificial Sequence
  Description of Artificial Sequence: Synthetic oligonucleotide
attcgtcgtgagggaagtaga

SEQ ID NO: 3949 - DNA, 21 bp, Artificial Sequence
  Description of Artificial Sequence: Synthetic oligonucleotide
tcacgacgaatacctcaacac

SEQ ID NO: 3950 - DNA, 22 bp, Artificial Sequence
  Description of Artificial Sequence: Synthetic oligonucleotide
ctcacgacgaatacctcaacac

SEQ ID NO: 3951 - DNA, 21 bp, Artificial Sequence
  Description of Artificial Sequence: Synthetic oligonucleotide
cccgaaaacacctataacgat

SEQ ID NO: 3952 - DNA, 24 bp, Artificial Sequence
  Description of Artificial Sequence: Synthetic oligonucleotide
agggagtagtttttagtatcgcgt

SEQ ID NO: 3953 - DNA, 22 bp, Artificial Sequence
  Description of Artificial Sequence: Synthetic oligonucleotide
agcgttagcgaaggcgggtggg

SEQ ID NO: 3954 - DNA, 22 bp, Artificial Sequence
  Description of Artificial Sequence: Synthetic oligonucleotide
aacgacatctataccaacaccg

SEQ ID NO: 3955 - DNA, 19 bp, Artificial Sequence
  Description of Artificial Sequence: Synthetic oligonucleotide
aaccgaatcccgtaactcc

SEQ ID NO: 3956 - DNA, 49 bp, Artificial Sequence
  Description of Artificial Sequence: Synthetic oligonucleotide
agaaatcgttttttaggtattcgtttacgtttagggtacgcgggagatt

SEQ ID NO: 3957 - DNA, 22 bp, Artificial Sequence
  Description of Artificial Sequence: Synthetic oligonucleotide
atacgaatcgcaacgctataaa

SEQ ID NO: 3958 - DNA, 19 bp, Artificial Sequence
  Description of Artificial Sequence: Synthetic oligonucleotide
tttatcgaggtaggaggcg

SEQ ID NO: 3959 - DNA, 20 bp, Artificial Sequence
  Description of Artificial Sequence: Synthetic oligonucleotide
tcggatatagcggtaggagt

SEQ ID NO: 3960 - DNA, 21 bp, Artificial Sequence
  Description of Artificial Sequence: Synthetic oligonucleotide
ccgactcctaccgctatatcc

SEQ ID NO: 3961 - DNA, 23 bp, Artificial Sequence
  Description of Artificial Sequence: Synthetic oligonucleotide
gggagtagtttttagtatcgcgt

SEQ ID NO: 3962 - DNA, 20 bp, Artificial Sequence
  Description of Artificial Sequence: Synthetic oligonucleotide
ggagtcgtcggtgttggtat

SEQ ID NO: 3963 - DNA, 21 bp, Artificial Sequence
  Description of Artificial Sequence: Synthetic oligonucleotide
acgaatcgaggtaagaggttt

SEQ ID NO: 3964 - DNA, 23 bp, Artificial Sequence
  Description of Artificial Sequence: Synthetic oligonucleotide
tagtttcggatatagcggtagga

SEQ ID NO: 3965 - DNA, 22 bp, Artificial Sequence
  Description of Artificial Sequence: Synthetic oligonucleotide
acgaaaccaaaacgctataaaa

SEQ ID NO: 3966 - DNA, 18 bp, Artificial Sequence
  Description of Artificial Sequence: Synthetic oligonucleotide
tagggtacgcgggagatt

SEQ ID NO: 3967 - DNA, 37 bp, Artificial Sequence
  Description of Artificial Sequence: Synthetic oligonucleotide
gagttacgggattcggttttttagataagtttcgttt

SEQ ID NO: 3968 - DNA, 18 bp, Artificial Sequence
  Description of Artificial Sequence: Synthetic oligonucleotide
ttagggtacgcgggagat

SEQ ID NO: 3969 - DNA, 36 bp, Artificial Sequence
  Description of Artificial Sequence: Synthetic oligonucleotide
ggagttacgggattcggttttttagataagtttcgt

SEQ ID NO: 3970 - DNA, 22 bp, Artificial Sequence
  Description of Artificial Sequence: Synthetic oligonucleotide
aacgaaaccaaaacgctataaa

SEQ ID NO: 3971 - DNA, 22 bp, Artificial Sequence
  Description of Artificial Sequence: Synthetic oligonucleotide
aaacgaaaccaaaacgctataa

SEQ ID NO: 3972 - DNA, 20 bp, Artificial Sequence
  Description of Artificial Sequence: Synthetic oligonucleotide
cgttataggtgttttcgggg

SEQ ID NO: 3973 - DNA, 49 bp, Artificial Sequence
  Description of Artificial Sequence: Synthetic oligonucleotide
atcgtagtttcggatatagcggtaggagtcgggagagtttttatagcgt

SEQ ID NO: 3974 - DNA, 20 bp, Artificial Sequence
  Description of Artificial Sequence: Synthetic oligonucleotide
tttatcgaggtaggaggcga

SEQ ID NO: 3975 - DNA, 23 bp, Artificial Sequence
  Description of Artificial Sequence: Synthetic oligonucleotide
cgtagtttcggatatagcggtag

SEQ ID NO: 3976 - DNA, 20 bp, Artificial Sequence
  Description of Artificial Sequence: Synthetic oligonucleotide
ttttatcgaggtaggaggcg

SEQ ID NO: 3977 - DNA, 40 bp, Artificial Sequence
  Description of Artificial Sequence: Synthetic oligonucleotide
ttcgggttagcgcggtgtttcggaggatagatgtattcga

SEQ ID NO: 3978 - DNA, 21 bp, Artificial Sequence
  Description of Artificial Sequence: Synthetic oligonucleotide
tacttccctcacgacgaatac

SEQ ID NO: 3979 - DNA, 20 bp, Artificial Sequence
  Description of Artificial Sequence: Synthetic oligonucleotide
cgaaaaataaaccgaacctt

SEQ ID NO: 3980 - DNA, 21 bp, Artificial Sequence
  Description of Artificial Sequence: Synthetic oligonucleotide
tcgtgagggaagtagaaatcg

SEQ ID NO: 3981 - DNA, 20 bp, Artificial Sequence
  Description of Artificial Sequence: Synthetic oligonucleotide
tcggggttaggattagttcg

SEQ ID NO: 3982 - DNA, 22 bp, Artificial Sequence
  Description of Artificial Sequence: Synthetic oligonucleotide
acatctataccaacaccgacga

SEQ ID NO: 3983 - DNA, 22 bp, Artificial Sequence
  Description of Artificial Sequence: Synthetic oligonucleotide
acgacatctataccaacaccga

SEQ ID NO: 3984 - DNA, 22 bp, Artificial Sequence
  Description of Artificial Sequence: Synthetic oligonucleotide
cgacatctataccaacaccgac

SEQ ID NO: 3985 - DNA, 22 bp, Artificial Sequence
  Description of Artificial Sequence: Synthetic oligonucleotide
catctataccaacaccgacgac

SEQ ID NO: 3986 - DNA, 22 bp, Artificial Sequence
  Description of Artificial Sequence: Synthetic oligonucleotide
tttttagtatcgcgttgtaagc

SEQ ID NO: 3987 - DNA, 22 bp, Artificial Sequence
  Description of Artificial Sequence: Synthetic oligonucleotide
tatgtacgtttagaggttcggg

SEQ ID NO: 3988 - DNA, 22 bp, Artificial Sequence
  Description of Artificial Sequence: Synthetic oligonucleotide
aaaaacgataaaaacaccgcta

SEQ ID NO: 3989 - DNA, 27 bp, Artificial Sequence
  Description of Artificial Sequence: Synthetic oligonucleotide
aaggggcggttttagtacgcgatttgg

SEQ ID NO: 3990 - DNA, 22 bp, Artificial Sequence
  Description of Artificial Sequence: Synthetic oligonucleotide
aagttatgttgtcgagtttcgg

SEQ ID NO: 3991 - DNA, 22 bp, Artificial Sequence
  Description of Artificial Sequence: Synthetic oligonucleotide
tacctaaataaaaacgccgcta

SEQ ID NO: 3992 - DNA, 42 bp, Artificial Sequence
  Description of Artificial Sequence: Synthetic oligonucleotide
gtttcggtcggggttattagtatttgttagtaaaacggggag

SEQ ID NO: 3993 - DNA, 22 bp, Artificial Sequence
  Description of Artificial Sequence: Synthetic oligonucleotide
gtacgtttagaggttcgggatt

SEQ ID NO: 3994 - DNA, 22 bp, Artificial Sequence
  Description of Artificial Sequence: Synthetic oligonucleotide
agagttagcggcgtttttattt

SEQ ID NO: 3995 - DNA, 22 bp, Artificial Sequence
  Description of Artificial Sequence: Synthetic oligonucleotide
acctatccaaatcgcgtactaa

SEQ ID NO: 3996 - DNA, 35 bp, Artificial Sequence
  Description of Artificial Sequence: Synthetic oligonucleotide
ggtatgtacgtttagaggttcgggatttgtttttg

SEQ ID NO: 3997 - DNA, 22 bp, Artificial Sequence
  Description of Artificial Sequence: Synthetic oligonucleotide
cgttttgagataggcgttaaga

SEQ ID NO: 3998 - DNA, 22 bp, Artificial Sequence
  Description of Artificial Sequence: Synthetic oligonucleotide
cgtaaacctcgctaactctcac

SEQ ID NO: 3999 - DNA, 28 bp, Artificial Sequence
  Description of Artificial Sequence: Synthetic oligonucleotide
tggaattgcgtagttagggttagggcga

SEQ ID NO: 4000 - DNA, 22 bp, Artificial Sequence
  Description of Artificial Sequence: Synthetic oligonucleotide
gtaatgtcgggcgtatagtttg

SEQ ID NO: 4001 - DNA, 22 bp, Artificial Sequence
  Description of Artificial Sequence: Synthetic oligonucleotide
atcgacttcgcctaccttctat

SEQ ID NO: 4002 - DNA, 34 bp, Artificial Sequence
  Description of Artificial Sequence: Synthetic oligonucleotide
gggggcgattatgacgattagtttggattttatg

SEQ ID NO: 4003 - DNA, 22 bp, Artificial Sequence
  Description of Artificial Sequence: Synthetic oligonucleotide
tacgtttagaggttcgggattt

SEQ ID NO: 4004 - DNA, 21 bp, Artificial Sequence
  Description of Artificial Sequence: Synthetic oligonucleotide
atgtacgtttagaggttcggg

SEQ ID NO: 4005 - DNA, 22 bp, Artificial Sequence
  Description of Artificial Sequence: Synthetic oligonucleotide
caaactatacgcccgacattac

SEQ ID NO: 4006 - DNA, 22 bp, Artificial Sequence
  Description of Artificial Sequence: Synthetic oligonucleotide
gagttagcggcgtttttattta

SEQ ID NO: 4007 - DNA, 22 bp, Artificial Sequence
  Description of Artificial Sequence: Synthetic oligonucleotide
atacctatccaaatcgcgtact

SEQ ID NO: 4008 - DNA, 35 bp, Artificial Sequence
  Description of Artificial Sequence: Synthetic oligonucleotide
atgtacgtttagaggttcgggatttgtttttgttt

SEQ ID NO: 4009 - DNA, 23 bp, Artificial Sequence
  Description of Artificial Sequence: Synthetic oligonucleotide
aataatacctatccaaatcgcgt

SEQ ID NO: 4010 - DNA, 21 bp, Artificial Sequence
  Description of Artificial Sequence: Synthetic oligonucleotide
acctaaataaaaacgccgcta

SEQ ID NO: 4011 - DNA, 22 bp, Artificial Sequence
  Description of Artificial Sequence: Synthetic oligonucleotide
ataatacctatccaaatcgcgt

SEQ ID NO: 4012 - DNA, 22 bp, Artificial Sequence
  Description of Artificial Sequence: Synthetic oligonucleotide
tggagtcgtagtttatttcggt

SEQ ID NO: 4013 - DNA, 21 bp, Artificial Sequence
  Description of Artificial Sequence: Synthetic oligonucleotide
ataaaaacgccgctaactctc

SEQ ID NO: 4014 - DNA, 29 bp, Artificial Sequence
  Description of Artificial Sequence: Synthetic oligonucleotide
tggggaagttatgttgtcgagtttcgggg

SEQ ID NO: 4015 - DNA, 22 bp, Artificial Sequence
  Description of Artificial Sequence: Synthetic oligonucleotide
ggagtcgtagtttatttcggtg

SEQ ID NO: 4016 - DNA, 23 bp, Artificial Sequence
  Description of Artificial Sequence: Synthetic oligonucleotide
aatacctatccaaatcgcgtact

SEQ ID NO: 4017 - DNA, 21 bp, Artificial Sequence
  Description of Artificial Sequence: Synthetic oligonucleotide
gagttagcggcgtttttattt

SEQ ID NO: 4018 - DNA, 23 bp, Artificial Sequence
  Description of Artificial Sequence: Synthetic oligonucleotide
tacctatccaaatcgcgtactaa

SEQ ID NO: 4019 - DNA, 22 bp, Artificial Sequence
  Description of Artificial Sequence: Synthetic oligonucleotide
taatacctatccaaatcgcgta

SEQ ID NO: 4020 - DNA, 21 bp, Artificial Sequence
  Description of Artificial Sequence: Synthetic oligonucleotide
taatgtcgggcgtatagtttg

SEQ ID NO: 4021 - DNA, 21 bp, Artificial Sequence
  Description of Artificial Sequence: Synthetic oligonucleotide
tcgacttcgcctaccttctat

SEQ ID NO: 4022 - DNA, 23 bp, Artificial Sequence
  Description of Artificial Sequence: Synthetic oligonucleotide
atacctaaataaaaacgccgcta

SEQ ID NO: 4023 - DNA, 21 bp, Artificial Sequence
  Description of Artificial Sequence: Synthetic oligonucleotide
cctaaataaaaacgccgctaa

SEQ ID NO: 4024 - DNA, 22 bp, Artificial Sequence
  Description of Artificial Sequence: Synthetic oligonucleotide
gcgattatgacgattagtttgg

SEQ ID NO: 4025 - DNA, 22 bp, Artificial Sequence
  Description of Artificial Sequence: Synthetic oligonucleotide
ttccgatatacgctcttctaca

SEQ ID NO: 4026 - DNA, 45 bp, Artificial Sequence
  Description of Artificial Sequence: Synthetic oligonucleotide
ttttatgtggatcgtaaaatagatgttttatagaaggtaggcgaa

SEQ ID NO: 4027 - DNA, 22 bp, Artificial Sequence
  Description of Artificial Sequence: Synthetic oligonucleotide
ggcgattatgacgattagtttg

SEQ ID NO: 4028 - DNA, 21 bp, Artificial Sequence
  Description of Artificial Sequence: Synthetic oligonucleotide
gcgtaaacctcgctaactctc

SEQ ID NO: 4029 - DNA, 22 bp, Artificial Sequence
  Description of Artificial Sequence: Synthetic oligonucleotide
tcggtcggggttattagtattt

SEQ ID NO: 4030 - DNA, 30 bp, Artificial Sequence
  Description of Artificial Sequence: Synthetic oligonucleotide
ggggagagttagcggcgtttttatttaggt

SEQ ID NO: 4031 - DNA, 22 bp, Artificial Sequence
  Description of Artificial Sequence: Synthetic oligonucleotide
cgtagtttatttcggtgttgtg

SEQ ID NO: 4032 - DNA, 22 bp, Artificial Sequence
  Description of Artificial Sequence: Synthetic oligonucleotide
tgtacgtttagaggttcgggat

SEQ ID NO: 4033 - DNA, 21 bp, Artificial Sequence
  Description of Artificial Sequence: Synthetic oligonucleotide
gttgttttcgttggagtcgta

SEQ ID NO: 4034 - DNA, 22 bp, Artificial Sequence
  Description of Artificial Sequence: Synthetic oligonucleotide
aaatactaataaccccgaccga

SEQ ID NO: 4035 - DNA, 22 bp, Artificial Sequence
  Description of Artificial Sequence: Synthetic oligonucleotide
ctacctaaaacgctacttcccg

SEQ ID NO: 4036 - DNA, 28 bp, Artificial Sequence
  Description of Artificial Sequence: Synthetic oligonucleotide
ggtaggcgaagtcgatgtagaagagcgt

SEQ ID NO: 4037 - DNA, 22 bp, Artificial Sequence
  Description of Artificial Sequence: Synthetic oligonucleotide
agttagcggcgtttttatttag

SEQ ID NO: 4038 - DNA, 21 bp, Artificial Sequence
  Description of Artificial Sequence: Synthetic oligonucleotide
acgtttagaggttcgggattt

SEQ ID NO: 4039 - DNA, 23 bp, Artificial Sequence
  Description of Artificial Sequence: Synthetic oligonucleotide
tccgatatacgctcttctacatc

SEQ ID NO: 4040 - DNA, 22 bp, Artificial Sequence
  Description of Artificial Sequence: Synthetic oligonucleotide
gagagttagcggcgtttttatt

SEQ ID NO: 4041 - DNA, 34 bp, Artificial Sequence
  Description of Artificial Sequence: Synthetic oligonucleotide
aggtatgtacgtttagaggttcgggatttgtttt

SEQ ID NO: 4042 - DNA, 22 bp, Artificial Sequence
  Description of Artificial Sequence: Synthetic oligonucleotide
tgtagacgttgtcgtagagtcg

SEQ ID NO: 4043 - DNA, 21 bp, Artificial Sequence
  Description of Artificial Sequence: Synthetic oligonucleotide
accgcatctctaactcgaaaa

SEQ ID NO: 4044 - DNA, 22 bp, Artificial Sequence
  Description of Artificial Sequence: Synthetic oligonucleotide
ttcgcgacgtcggtcgggacgt

SEQ ID NO: 4045 - DNA, 21 bp, Artificial Sequence
  Description of Artificial Sequence: Synthetic oligonucleotide
tacctaaaacgctacttcccg

SEQ ID NO: 4046 - DNA, 20 bp, Artificial Sequence
  Description of Artificial Sequence: Synthetic oligonucleotide
gaccgcatctctaactcgaa

SEQ ID NO: 4047 - DNA, 20 bp, Artificial Sequence
  Description of Artificial Sequence: Synthetic oligonucleotide
cgtttagaggttcgggattt

SEQ ID NO: 4048 - DNA, 21 bp, Artificial Sequence
  Description of Artificial Sequence: Synthetic oligonucleotide
agttatgttgtcgagtttcgg

SEQ ID NO: 4049 - DNA, 20 bp, Artificial Sequence
  Description of Artificial Sequence: Synthetic oligonucleotide
ccgcatctctaactcgaaaa

SEQ ID NO: 4050 - DNA, 22 bp, Artificial Sequence
  Description of Artificial Sequence: Synthetic oligonucleotide
tttcggtcggggttattagtat

SEQ ID NO: 4051 - DNA, 20 bp, Artificial Sequence
  Description of Artificial Sequence: Synthetic oligonucleotide
gcgttttgagataggcgtta

SEQ ID NO: 4052 - DNA, 21 bp, Artificial Sequence
  Description of Artificial Sequence: Synthetic oligonucleotide
gggcgattatgacgattagtt

SEQ ID NO: 4053 - DNA, 45 bp, Artificial Sequence
  Description of Artificial Sequence: Synthetic oligonucleotide
tgtggatcgtaaaatagatgttttatagaaggtaggcgaagtcga

SEQ ID NO: 4054 - DNA, 22 bp, Artificial Sequence
  Description of Artificial Sequence: Synthetic oligonucleotide
gttagcggcgtttttatttagg

SEQ ID NO: 4055 - DNA, 21 bp, Artificial Sequence
  Description of Artificial Sequence: Synthetic oligonucleotide
gagagttagcggcgtttttat

SEQ ID NO: 4056 - DNA, 22 bp, Artificial Sequence
  Description of Artificial Sequence: Synthetic oligonucleotide
cgattccgatatacgctcttct

SEQ ID NO: 4057 - DNA, 45 bp, Artificial Sequence
  Description of Artificial Sequence: Synthetic oligonucleotide
tggatcgtaaaatagatgttttatagaaggtaggcgaagtcgatg

SEQ ID NO: 4058 - DNA, 22 bp, Artificial Sequence
  Description of Artificial Sequence: Synthetic oligonucleotide
cgttaagatttggaattgcgta

SEQ ID NO: 4059 - DNA, 21 bp, Artificial Sequence
  Description of Artificial Sequence: Synthetic oligonucleotide
caaactatacgcccgacatta

SEQ ID NO: 4060 - DNA, 39 bp, Artificial Sequence
  Description of Artificial Sequence: Synthetic oligonucleotide
tagggcgaatattagtagggtgagagttagcgaggttta

SEQ ID NO: 4061 - DNA, 21 bp, Artificial Sequence
  Description of Artificial Sequence: Synthetic oligonucleotide
cgcgctatacttcctcctaat

SEQ ID NO: 4062 - DNA, 28 bp, Artificial Sequence
  Description of Artificial Sequence: Synthetic oligonucleotide
agcgaggtttacgcgtaatgtcgggcgt

SEQ ID NO: 4063 - DNA, 22 bp, Artificial Sequence
  Description of Artificial Sequence: Synthetic oligonucleotide
gttgttttcgttggagtcgtag

SEQ ID NO: 4064 - DNA, 22 bp, Artificial Sequence
  Description of Artificial Sequence: Synthetic oligonucleotide
caaatactaataaccccgaccg

SEQ ID NO: 4065 - DNA, 23 bp, Artificial Sequence
  Description of Artificial Sequence: Synthetic oligonucleotide
attccgatatacgctcttctaca

SEQ ID NO: 4066 - DNA, 22 bp, Artificial Sequence
  Description of Artificial Sequence: Synthetic oligonucleotide
cgattatgacgattagtttgga

SEQ ID NO: 4067 - DNA, 21 bp, Artificial Sequence
  Description of Artificial Sequence: Synthetic oligonucleotide
aaaacgataaaaacaccgcta

SEQ ID NO: 4068 - DNA, 21 bp, Artificial Sequence
  Description of Artificial Sequence: Synthetic oligonucleotide
cctatccaaatcgcgtactaa

SEQ ID NO: 4069 - DNA, 21 bp, Artificial Sequence
  Description of Artificial Sequence: Synthetic oligonucleotide
ttagcggcgtttttatttagg

SEQ ID NO: 4070 - DNA, 21 bp, Artificial Sequence
  Description of Artificial Sequence: Synthetic oligonucleotide
gttatgttgtcgagtttcggg

SEQ ID NO: 4071 - DNA, 21 bp, Artificial Sequence
  Description of Artificial Sequence: Synthetic oligonucleotide
aactatacgcccgacattacg

SEQ ID NO: 4072 - DNA, 21 bp, Artificial Sequence
  Description of Artificial Sequence: Synthetic oligonucleotide
ttcggtcggggttattagtat

SEQ ID NO: 4073 - DNA, 20 bp, Artificial Sequence
  Description of Artificial Sequence: Synthetic oligonucleotide
gtttcggtcggggttattag

SEQ ID NO: 4074 - DNA, 22 bp, Artificial Sequence
  Description of Artificial Sequence: Synthetic oligonucleotide
cccgaacctctaaacgtacata

SEQ ID NO: 4075 - DNA, 21 bp, Artificial Sequence
  Description of Artificial Sequence: Synthetic oligonucleotide
aatactaataaccccgaccga

SEQ ID NO: 4076 - DNA, 21 bp, Artificial Sequence
  Description of Artificial Sequence: Synthetic oligonucleotide
ttgttttcgttggagtcgtag

SEQ ID NO: 4077 - DNA, 22 bp, Artificial Sequence
  Description of Artificial Sequence: Synthetic oligonucleotide
atcccgaacctctaaacgtaca

SEQ ID NO: 4078 - DNA, 22 bp, Artificial Sequence
  Description of Artificial Sequence: Synthetic oligonucleotide
cggtcggggttattagtatttg

SEQ ID NO: 4079 - DNA, 21 bp, Artificial Sequence
  Description of Artificial Sequence: Synthetic oligonucleotide
tgagagttagcgaggtttacg

SEQ ID NO: 4080 - DNA, 21 bp, Artificial Sequence
  Description of Artificial Sequence: Synthetic oligonucleotide
aactaatcgtcataatcgccc

SEQ ID NO: 4081 - DNA, 32 bp, Artificial Sequence
  Description of Artificial Sequence: Synthetic oligonucleotide
gtaatgtcgggcgtatagtttggtgaaggtaa

SEQ ID NO: 4082 - DNA, 20 bp, Artificial Sequence
  Description of Artificial Sequence: Synthetic oligonucleotide
ttatgttgtcgagtttcggg

SEQ ID NO: 4083 - DNA, 23 bp, Artificial Sequence
  Description of Artificial Sequence: Synthetic oligonucleotide
agtcgtagtttatttcggtgttg

SEQ ID NO: 4084 - DNA, 22 bp, Artificial Sequence
  Description of Artificial Sequence: Synthetic oligonucleotide
gtcgtagtttatttcggtgttg

SEQ ID NO: 4085 - DNA, 22 bp, Artificial Sequence
  Description of Artificial Sequence: Synthetic oligonucleotide
tcgtagtttatttcggtgttgt

SEQ ID NO: 4086 - DNA, 20 bp, Artificial Sequence
  Description of Artificial Sequence: Synthetic oligonucleotide
aatgtcgggcgtatagtttg

SEQ ID NO: 4087 - DNA, 20 bp, Artificial Sequence
  Description of Artificial Sequence: Synthetic oligonucleotide
taaaaacgccgctaactctc

SEQ ID NO: 4088 - DNA, 22 bp, Artificial Sequence
  Description of Artificial Sequence: Synthetic oligonucleotide
ccgatatacgctcttctacatc

SEQ ID NO: 4089 - DNA, 20 bp, Artificial Sequence
  Description of Artificial Sequence: Synthetic oligonucleotide
actatacgcccgacattacg

SEQ ID NO: 4090 - DNA, 22 bp, Artificial Sequence
  Description of Artificial Sequence: Synthetic oligonucleotide
ttttcgttggagtcgtagttta

SEQ ID NO: 4091 - DNA, 45 bp, Artificial Sequence
  Description of Artificial Sequence: Synthetic oligonucleotide
gtggatcgtaaaatagatgttttatagaaggtaggcgaagtcgat

SEQ ID NO: 4092 - DNA, 21 bp, Artificial Sequence
  Description of Artificial Sequence: Synthetic oligonucleotide
aaatactaataaccccgaccg

SEQ ID NO: 4093 - DNA, 22 bp, Artificial Sequence
  Description of Artificial Sequence: Synthetic oligonucleotide
gtagacgttgtcgtagagtcgg

SEQ ID NO: 4094 - DNA, 21 bp, Artificial Sequence
  Description of Artificial Sequence: Synthetic oligonucleotide
cggtcggggttattagtattt

SEQ ID NO: 4095 - DNA, 22 bp, Artificial Sequence
  Description of Artificial Sequence: Synthetic oligonucleotide
ttggagtcgtagtttatttcgg

SEQ ID NO: 4096 - DNA, 23 bp, Artificial Sequence
  Description of Artificial Sequence: Synthetic oligonucleotide
tatagaaggtaggcgaagtcgat

SEQ ID NO: 4097 - DNA, 26 bp, Artificial Sequence
  Description of Artificial Sequence: Synthetic oligonucleotide
agcgtatatcggaatcggcgttgggt

SEQ ID NO: 4098 - DNA, 22 bp, Artificial Sequence
  Description of Artificial Sequence: Synthetic oligonucleotide
aaactaatcgtcataatcgccc

SEQ ID NO: 4099 - DNA, 21 bp, Artificial Sequence
  Description of Artificial Sequence: Synthetic oligonucleotide
tagacgttgtcgtagagtcgg

SEQ ID NO: 4100 - DNA, 23 bp, Artificial Sequence
  Description of Artificial Sequence: Synthetic oligonucleotide
gttttcgttggagtcgtagttta

SEQ ID NO: 4101 - DNA, 20 bp, Artificial Sequence
  Description of Artificial Sequence: Synthetic oligonucleotide
acctaaaacgctacttcccg

SEQ ID NO: 4102 - DNA, 20 bp, Artificial Sequence
  Description of Artificial Sequence: Synthetic oligonucleotide
cccgaacctctaaacgtaca

SEQ ID NO: 4103 - DNA, 26 bp, Artificial Sequence
  Description of Artificial Sequence: Synthetic oligonucleotide
agtaaaacggggagagttagcggcgt

SEQ ID NO: 4104 - DNA, 21 bp, Artificial Sequence
  Description of Artificial Sequence: Synthetic oligonucleotide
cgtaatgtcgggcgtatagtt

SEQ ID NO: 4105 - DNA, 22 bp, Artificial Sequence
  Description of Artificial Sequence: Synthetic oligonucleotide
gattccgatatacgctcttcta

SEQ ID NO: 4106 - DNA, 21 bp, Artificial Sequence
  Description of Artificial Sequence: Synthetic oligonucleotide
gttgtcgtagagtcgggtttt

SEQ ID NO: 4107 - DNA, 24 bp, Artificial Sequence
  Description of Artificial Sequence: Synthetic oligonucleotide
ttcgttcgcgtttacgtcgggggt

SEQ ID NO: 4108 - DNA, 21 bp, Artificial Sequence
  Description of Artificial Sequence: Synthetic oligonucleotide
tacctatccaaatcgcgtact

SEQ ID NO: 4109 - DNA, 21 bp, Artificial Sequence
  Description of Artificial Sequence: Synthetic oligonucleotide
gaccgcatctctaactcgaaa

SEQ ID NO: 4110 - DNA, 21 bp, Artificial Sequence
  Description of Artificial Sequence: Synthetic oligonucleotide
aatacctatccaaatcgcgta

SEQ ID NO: 4111 - DNA, 21 bp, Artificial Sequence
  Description of Artificial Sequence: Synthetic oligonucleotide
tcccgaacctctaaacgtaca

SEQ ID NO: 4112 - DNA, 20 bp, Artificial Sequence
  Description of Artificial Sequence: Synthetic oligonucleotide
cgtactaaaaccgcccctta

SEQ ID NO: 4113 - DNA, 20 bp, Artificial Sequence
  Description of Artificial Sequence: Synthetic oligonucleotide
taaaacggggagagttagcg

SEQ ID NO: 4114 - DNA, 20 bp, Artificial Sequence
  Description of Artificial Sequence: Synthetic oligonucleotide
cgctaactctccccgtttta

SEQ ID NO: 4115 - DNA, 24 bp, Artificial Sequence
  Description of Artificial Sequence: Synthetic oligonucleotide
taatacctatccaaatcgcgtact

SEQ ID NO: 4116 - DNA, 22 bp, Artificial Sequence
  Description of Artificial Sequence: Synthetic oligonucleotide
cgagtcgtttgcgtataaataa

SEQ ID NO: 4117 - DNA, 20 bp, Artificial Sequence
  Description of Artificial Sequence: Synthetic oligonucleotide
gctactccgaatcgaaatcc

SEQ ID NO: 4118 - DNA, 38 bp, Artificial Sequence
  Description of Artificial Sequence: Synthetic oligonucleotide
ggcgcggagttttttattttgtaggagtcgcgtttcga

SEQ ID NO: 4119 - DNA, 23 bp, Artificial Sequence
  Description of Artificial Sequence: Synthetic oligonucleotide
gagtcgtagtttatttcggtgtt

SEQ ID NO: 4120 - DNA, 22 bp, Artificial Sequence
  Description of Artificial Sequence: Synthetic oligonucleotide
gtgagagttagcgaggtttacg

SEQ ID NO: 4121 - DNA, 19 bp, Artificial Sequence
  Description of Artificial Sequence: Synthetic oligonucleotide
taatcgtcataatcgcccc

SEQ ID NO: 4122 - DNA, 21 bp, Artificial Sequence
  Description of Artificial Sequence: Synthetic oligonucleotide
aaactatacgcccgacattac

SEQ ID NO: 4123 - DNA, 22 bp, Artificial Sequence
  Description of Artificial Sequence: Synthetic oligonucleotide
cctatccaaatcgcgtactaaa

SEQ ID NO: 4124 - DNA, 21 bp, Artificial Sequence
  Description of Artificial Sequence: Synthetic oligonucleotide
cgggaagtagcgttttaggta

SEQ ID NO: 4125 - DNA, 20 bp, Artificial Sequence
  Description of Artificial Sequence: Synthetic oligonucleotide
gaataaacgacgaaaaccga

SEQ ID NO: 4126 - DNA, 30 bp, Artificial Sequence
  Description of Artificial Sequence: Synthetic oligonucleotide
agcggttggaggttttttcgaatagttggg

SEQ ID NO: 4127 - DNA, 21 bp, Artificial Sequence
  Description of Artificial Sequence: Synthetic oligonucleotide
gtttcggtcggggttattagt

SEQ ID NO: 4128 - DNA, 22 bp, Artificial Sequence
  Description of Artificial Sequence: Synthetic oligonucleotide
cctaaataaaaacgccgctaac

SEQ ID NO: 4129 - DNA, 20 bp, Artificial Sequence
  Description of Artificial Sequence: Synthetic oligonucleotide
gacgaccgcatctctaactc

SEQ ID NO: 4130 - DNA, 19 bp, Artificial Sequence
  Description of Artificial Sequence: Synthetic oligonucleotide
gtcgtcgcgttttgagata

SEQ ID NO: 4131 - DNA, 19 bp, Artificial Sequence
  Description of Artificial Sequence: Synthetic oligonucleotide
ccgattccgatatacgctc

SEQ ID NO: 4132 - DNA, 19 bp, Artificial Sequence
  Description of Artificial Sequence: Synthetic oligonucleotide
cgcgtaaacctcgctaact

SEQ ID NO: 4133 - DNA, 20 bp, Artificial Sequence
  Description of Artificial Sequence: Synthetic oligonucleotide
aaccgactacgcaaacaaaa

SEQ ID NO: 4134 - DNA, 22 bp, Artificial Sequence
  Description of Artificial Sequence: Synthetic oligonucleotide
cggtgtagacgttgtcgtagag

SEQ ID NO: 4135 - DNA, 20 bp, Artificial Sequence
  Description of Artificial Sequence: Synthetic oligonucleotide
tagcggcgtttttatttagg

SEQ ID NO: 4136 - DNA, 22 bp, Artificial Sequence
  Description of Artificial Sequence: Synthetic oligonucleotide
gttttcgttggagtcgtagttt

SEQ ID NO: 4137 - DNA, 19 bp, Artificial Sequence
  Description of Artificial Sequence: Synthetic oligonucleotide
aaaaacgccgctaactctc

SEQ ID NO: 4138 - DNA, 19 bp, Artificial Sequence
  Description of Artificial Sequence: Synthetic oligonucleotide
tttagttgcggtttcggag

SEQ ID NO: 4139 - DNA, 22 bp, Artificial Sequence
  Description of Artificial Sequence: Synthetic oligonucleotide
acgcgactcctacaaaataaaa

SEQ ID NO: 4140 - DNA, 24 bp, Artificial Sequence
  Description of Artificial Sequence: Synthetic oligonucleotide
aatttcgttggcggcgcggagttt

SEQ ID NO: 4141 - DNA, 22 bp, Artificial Sequence
  Description of Artificial Sequence: Synthetic oligonucleotide
aacgcgactcctacaaaataaa

SEQ ID NO: 4142 - DNA, 21 bp, Artificial Sequence
  Description of Artificial Sequence: Synthetic oligonucleotide
cgtaaggttggagttgtcgtc

SEQ ID NO: 4143 - DNA, 32 bp, Artificial Sequence
  Description of Artificial Sequence: Synthetic oligonucleotide
aggcgttaagatttggaattgcgtagttaggg

SEQ ID NO: 4144 - DNA, 19 bp, Artificial Sequence
  Description of Artificial Sequence: Synthetic oligonucleotide
ctaaaacgctacttcccgc

SEQ ID NO: 4145 - DNA, 23 bp, Artificial Sequence
  Description of Artificial Sequence: Synthetic oligonucleotide
gtgtagacgttgtcgtagagtcg

SEQ ID NO: 4146 - DNA, 19 bp, Artificial Sequence
  Description of Artificial Sequence: Synthetic oligonucleotide
tcgtcgcgttttgagatag

SEQ ID NO: 4147 - DNA, 41 bp, Artificial Sequence
  Description of Artificial Sequence: Synthetic oligonucleotide
ggcgaatattagtagggtgagagttagcgaggtttacgcgt

SEQ ID NO: 4148 - DNA, 24 bp, Artificial Sequence
  Description of Artificial Sequence: Synthetic oligonucleotide
cgatatacgctcttctacatcgac

SEQ ID NO: 4149 - DNA, 20 bp, Artificial Sequence
  Description of Artificial Sequence: Synthetic oligonucleotide
agacgttgtcgtagagtcgg

SEQ ID NO: 4150 - DNA, 19 bp, Artificial Sequence
  Description of Artificial Sequence: Synthetic oligonucleotide
tatgttgtcgagtttcggg

SEQ ID NO: 4151 - DNA, 19 bp, Artificial Sequence
  Description of Artificial Sequence: Synthetic oligonucleotide
accaaactatacgcccgac

SEQ ID NO: 4152 - DNA, 19 bp, Artificial Sequence
  Description of Artificial Sequence: Synthetic oligonucleotide
gtcgcgttttgagataggc

SEQ ID NO: 4153 - DNA, 23 bp, Artificial Sequence
  Description of Artificial Sequence: Synthetic oligonucleotide
ttcggtcggggttattagtattt

SEQ ID NO: 4154 - DNA, 24 bp, Artificial Sequence
  Description of Artificial Sequence: Synthetic oligonucleotide
tatacgctcttctacatcgacttc

SEQ ID NO: 4155 - DNA, 45 bp, Artificial Sequence
  Description of Artificial Sequence: Synthetic oligonucleotide
attttatgtggatcgtaaaatagatgttttatagaaggtaggcga

SEQ ID NO: 4156 - DNA, 19 bp, Artificial Sequence
  Description of Artificial Sequence: Synthetic oligonucleotide
cctaaaacgctacttcccg

SEQ ID NO: 4157 - DNA, 19 bp, Artificial Sequence
  Description of Artificial Sequence: Synthetic oligonucleotide
aacgccgattccgatatac

SEQ ID NO: 4158 - DNA, 36 bp, Artificial Sequence
  Description of Artificial Sequence: Synthetic oligonucleotide
agatgttttatagaaggtaggcgaagtcgatgtaga

SEQ ID NO: 4159 - DNA, 22 bp, Artificial Sequence
  Description of Artificial Sequence: Synthetic oligonucleotide
tgttttcgttggagtcgtagtt

SEQ ID NO: 4160 - DNA, 22 bp, Artificial Sequence
  Description of Artificial Sequence: Synthetic oligonucleotide
ttgttttcgttggagtcgtagt

SEQ ID NO: 4161 - DNA, 20 bp, Artificial Sequence
  Description of Artificial Sequence: Synthetic oligonucleotide
agttagcggcgtttttattt

SEQ ID NO: 4162 - DNA, 18 bp, Artificial Sequence
  Description of Artificial Sequence: Synthetic oligonucleotide
aaacgccgctaactctcc

SEQ ID NO: 4163 - DNA, 18 bp, Artificial Sequence
  Description of Artificial Sequence: Synthetic oligonucleotide
aaacggggagagttagcg

SEQ ID NO: 4164 - DNA, 45 bp, Artificial Sequence
  Description of Artificial Sequence: Synthetic oligonucleotide
gatcgtaaaatagatgttttatagaaggtaggcgaagtcgatgta

SEQ ID NO: 4165 - DNA, 20 bp, Artificial Sequence
  Description of Artificial Sequence: Synthetic oligonucleotide
cgcatctctaactcgaaaaa

SEQ ID NO: 4166 - DNA, 25 bp, Artificial Sequence
  Description of Artificial Sequence: Synthetic oligonucleotide
gatatacgctcttctacatcgactt

SEQ ID NO: 4167 - DNA, 25 bp, Artificial Sequence
  Description of Artificial Sequence: Synthetic oligonucleotide
atatacgctcttctacatcgacttc

SEQ ID NO: 4168 - DNA, 20 bp, Artificial Sequence
  Description of Artificial Sequence: Synthetic oligonucleotide
atgtcgggcgtatagtttgg

SEQ ID NO: 4169 - DNA, 19 bp, Artificial Sequence
  Description of Artificial Sequence: Synthetic oligonucleotide
gcgttttgagataggcgtt

SEQ ID NO: 4170 - DNA, 19 bp, Artificial Sequence
  Description of Artificial Sequence: Synthetic oligonucleotide
catcgacttcgcctacctt

SEQ ID NO: 4171 - DNA, 20 bp, Artificial Sequence
  Description of Artificial Sequence: Synthetic oligonucleotide
cgttaagatttggaattgcg

SEQ ID NO: 4172 - DNA, 20 bp, Artificial Sequence
  Description of Artificial Sequence: Synthetic oligonucleotide
cgacttcgcctaccttctat

SEQ ID NO: 4173 - DNA, 22 bp, Artificial Sequence
  Description of Artificial Sequence: Synthetic oligonucleotide
attcaccgaatcgaacttaaaa

SEQ ID NO: 4174 - DNA, 22 bp, Artificial Sequence
  Description of Artificial Sequence: Synthetic oligonucleotide
cggttgcgtaggtagaagaagt

SEQ ID NO: 4175 - DNA, 29 bp, Artificial Sequence
  Description of Artificial Sequence: Synthetic oligonucleotide
gttcgagagggtttttagtcgttggtggg

SEQ ID NO: 4176 - DNA, 23 bp, Artificial Sequence
  Description of Artificial Sequence: Synthetic oligonucleotide
aaaaacaaacgaaaccgatataa

SEQ ID NO: 4177 - DNA, 22 bp, Artificial Sequence
  Description of Artificial Sequence: Synthetic oligonucleotide
gattttaagttcgattcggtga

SEQ ID NO: 4178 - DNA, 29 bp, Artificial Sequence
  Description of Artificial Sequence: Synthetic oligonucleotide
agatttagcgtcggtttcggtatgcgttt

SEQ ID NO: 4179 - DNA, 21 bp, Artificial Sequence
  Description of Artificial Sequence: Synthetic oligonucleotide
gtcggttgcgtaggtagaaga

SEQ ID NO: 4180 - DNA, 22 bp, Artificial Sequence
  Description of Artificial Sequence: Synthetic oligonucleotide
aaaacaaacgaaaccgatataa

SEQ ID NO: 4181 - DNA, 21 bp, Artificial Sequence
  Description of Artificial Sequence: Synthetic oligonucleotide
gaacgacgatacaaacgctac

SEQ ID NO: 4182 - DNA, 22 bp, Artificial Sequence
  Description of Artificial Sequence: Synthetic oligonucleotide
gtcgtatttttagttcggggag

SEQ ID NO: 4183 - DNA, 23 bp, Artificial Sequence
  Description of Artificial Sequence: Synthetic oligonucleotide
ggcgtcgcgggagttcggttttg

SEQ ID NO: 4184 - DNA, 20 bp, Artificial Sequence
  Description of Artificial Sequence: Synthetic oligonucleotide
tcggttgcgtaggtagaaga

SEQ ID NO: 4185 - DNA, 22 bp, Artificial Sequence
  Description of Artificial Sequence: Synthetic oligonucleotide
cgctattactatccccgctaaa

SEQ ID NO: 4186 - DNA, 21 bp, Artificial Sequence
  Description of Artificial Sequence: Synthetic oligonucleotide
gtaggtttcgggattcgataa

SEQ ID NO: 4187 - DNA, 37 bp, Artificial Sequence
  Description of Artificial Sequence: Synthetic oligonucleotide
agttgttgtattattatagtatcgaggtgagttgcga

SEQ ID NO: 4188 - DNA, 21 bp, Artificial Sequence
  Description of Artificial Sequence: Synthetic oligonucleotide
tcgtatttttagttcggggag

SEQ ID NO: 4189 - DNA, 22 bp, Artificial Sequence
  Description of Artificial Sequence: Synthetic oligonucleotide
caaattcaccgaatcgaactta

SEQ ID NO: 4190 - DNA, 21 bp, Artificial Sequence
  Description of Artificial Sequence: Synthetic oligonucleotide
cggttgcgtaggtagaagaag

SEQ ID NO: 4191 - DNA, 20 bp, Artificial Sequence
  Description of Artificial Sequence: Synthetic oligonucleotide
acgctattactatccccgct

SEQ ID NO: 4192 - DNA, 21 bp, Artificial Sequence
  Description of Artificial Sequence: Synthetic oligonucleotide
atacaaacgctaccgcaaaac

SEQ ID NO: 4193 - DNA, 21 bp, Artificial Sequence
  Description of Artificial Sequence: Synthetic oligonucleotide
ggttttcggcgtgggcgcggg

SEQ ID NO: 4194 - DNA, 21 bp, Artificial Sequence
  Description of Artificial Sequence: Synthetic oligonucleotide
aacgacgatacaaacgctacc

SEQ ID NO: 4195 - DNA, 21 bp, Artificial Sequence
  Description of Artificial Sequence: Synthetic oligonucleotide
gtcgtatttttagttcgggga

SEQ ID NO: 4196 - DNA, 19 bp, Artificial Sequence
  Description of Artificial Sequence: Synthetic oligonucleotide
aggtcggttgcgtaggtag

SEQ ID NO: 4197 - DNA, 20 bp, Artificial Sequence
  Description of Artificial Sequence: Synthetic oligonucleotide
acgacgatacaaacgctacc

SEQ ID NO: 4198 - DNA, 21 bp, Artificial Sequence
  Description of Artificial Sequence: Synthetic oligonucleotide
ttcaccgaatcgaacttaaaa

SEQ ID NO: 4199 - DNA, 20 bp, Artificial Sequence
  Description of Artificial Sequence: Synthetic oligonucleotide
aacgcgcacgctattactat

SEQ ID NO: 4200 - DNA, 29 bp, Artificial Sequence
  Description of Artificial Sequence: Synthetic oligonucleotide
gtatcgaggtgagttgcgattttagcggg

SEQ ID NO: 4201 - DNA, 22 bp, Artificial Sequence
  Description of Artificial Sequence: Synthetic oligonucleotide
atattatcgaatcccgaaacct

SEQ ID NO: 4202 - DNA, 19 bp, Artificial Sequence
  Description of Artificial Sequence: Synthetic oligonucleotide
cgggtttttaggcgtgtat

SEQ ID NO: 4203 - DNA, 32 bp, Artificial Sequence
  Description of Artificial Sequence: Synthetic oligonucleotide
aggtgggagcgtcgttaatttttttcgttttg

SEQ ID NO: 4204 - DNA, 22 bp, Artificial Sequence
  Description of Artificial Sequence: Synthetic oligonucleotide
cgggattcgataatatggtttt

SEQ ID NO: 4205 - DNA, 21 bp, Artificial Sequence
  Description of Artificial Sequence: Synthetic oligonucleotide
tcgggattcgataatatggtt

SEQ ID NO: 4206 - DNA, 22 bp, Artificial Sequence
  Description of Artificial Sequence: Synthetic oligonucleotide
tattatcgaatcccgaaaccta

SEQ ID NO: 4207 - DNA, 22 bp, Artificial Sequence
  Description of Artificial Sequence: Synthetic oligonucleotide
attatcgaatcccgaaacctac

SEQ ID NO: 4208 - DNA, 22 bp, Artificial Sequence
  Description of Artificial Sequence: Synthetic oligonucleotide
taattcccgactcaacgatact

SEQ ID NO: 4209 - DNA, 19 bp, Artificial Sequence
  Description of Artificial Sequence: Synthetic oligonucleotide
attttcgggcgttttaggt

SEQ ID NO: 4210 - DNA, 26 bp, Artificial Sequence
  Description of Artificial Sequence: Synthetic oligonucleotide
ttcgagcggttttcgtgcgtttcgaa

SEQ ID NO: 4211 - DNA, 19 bp, Artificial Sequence
  Description of Artificial Sequence: Synthetic oligonucleotide
gcgtgttggagtcgttttt

SEQ ID NO: 4212 - DNA, 37 bp, Artificial Sequence
  Description of Artificial Sequence: Synthetic oligonucleotide
ttcgggtttttaggcgtgtatgtttaggtgggagcgt

SEQ ID NO: 4213 - DNA, 20 bp, Artificial Sequence
  Description of Artificial Sequence: Synthetic oligonucleotide
attaacgacgctcccaccta

SEQ ID NO: 4214 - DNA, 22 bp, Artificial Sequence
  Description of Artificial Sequence: Synthetic oligonucleotide
agtatcgttgagtcgggaatta

SEQ ID NO: 4215 - DNA, 28 bp, Artificial Sequence
  Description of Artificial Sequence: Synthetic oligonucleotide
aggtcgcgtgttggagtcgttttttagg

SEQ ID NO: 4216 - DNA, 22 bp, Artificial Sequence
  Description of Artificial Sequence: Synthetic oligonucleotide
ttcgggattcgataatatggtt

SEQ ID NO: 4217 - DNA, 19 bp, Artificial Sequence
  Description of Artificial Sequence: Synthetic oligonucleotide
ggtcggttgcgtaggtaga

SEQ ID NO: 4218 - DNA, 19 bp, Artificial Sequence
  Description of Artificial Sequence: Synthetic oligonucleotide
gaggtcggttgcgtaggta

SEQ ID NO: 4219 - DNA, 23 bp, Artificial Sequence
  Description of Artificial Sequence: Synthetic oligonucleotide
aattcaccgaatcgaacttaaaa

SEQ ID NO: 4220 - DNA, 22 bp, Artificial Sequence
  Description of Artificial Sequence: Synthetic oligonucleotide
gacgacgaacgctaaaaataaa

SEQ ID NO: 4221 - DNA, 20 bp, Artificial Sequence
  Description of Artificial Sequence: Synthetic oligonucleotide
gttcggtttcgggatagttg

SEQ ID NO: 4222 - DNA, 22 bp, Artificial Sequence
  Description of Artificial Sequence: Synthetic oligonucleotide
gtcgcgtcgacgggtttcgcgt

SEQ ID NO: 4223 - DNA, 20 bp, Artificial Sequence
  Description of Artificial Sequence: Synthetic oligonucleotide
tacaaacgctaccgcaaaac

SEQ ID NO: 4224 - DNA, 20 bp, Artificial Sequence
  Description of Artificial Sequence: Synthetic oligonucleotide
gatacaaacgctaccgcaaa

SEQ ID NO: 4225 - DNA, 22 bp, Artificial Sequence
  Description of Artificial Sequence: Synthetic oligonucleotide
cgaccataacgatcaatctaaa

SEQ ID NO: 4226 - DNA, 20 bp, Artificial Sequence
  Description of Artificial Sequence: Synthetic oligonucleotide
tggagcgttgtttttcgtag

SEQ ID NO: 4227 - DNA, 34 bp, Artificial Sequence
  Description of Artificial Sequence: Synthetic oligonucleotide
agcgtcggtttcggtatgcgtttttttatatcgg

SEQ ID NO: 4228 - DNA, 20 bp, Artificial Sequence
  Description of Artificial Sequence: Synthetic oligonucleotide
gcgacccgtctaataaaacc

SEQ ID NO: 4229 - DNA, 21 bp, Artificial Sequence
  Description of Artificial Sequence: Synthetic oligonucleotide
gtagcgtttgtatcgtcgttc

SEQ ID NO: 4230 - DNA, 33 bp, Artificial Sequence
  Description of Artificial Sequence: Synthetic oligonucleotide
ggcgaggggttcgcgttcgtggttttacgcgtt

SEQ ID NO: 4231 - DNA, 23 bp, Artificial Sequence
  Description of Artificial Sequence: Synthetic oligonucleotide
acgaccataacgatcaatctaaa

SEQ ID NO: 4232 - DNA, 23 bp, Artificial Sequence
  Description of Artificial Sequence: Synthetic oligonucleotide
aacgaccataacgatcaatctaa

SEQ ID NO: 4233 - DNA, 22 bp, Artificial Sequence
  Description of Artificial Sequence: Synthetic oligonucleotide
ctataattcccgactcaacgat

SEQ ID NO: 4234 - DNA, 19 bp, Artificial Sequence
  Description of Artificial Sequence: Synthetic oligonucleotide
ggcgttttaggttcgtttc

SEQ ID NO: 4235 - DNA, 22 bp, Artificial Sequence
  Description of Artificial Sequence: Synthetic oligonucleotide
tgcgtttcgaaggtgggggcgg

SEQ ID NO: 4236 - DNA, 21 bp, Artificial Sequence
  Description of Artificial Sequence: Synthetic oligonucleotide
cgtatttttagttcggggagg

SEQ ID NO: 4237 - DNA, 22 bp, Artificial Sequence
  Description of Artificial Sequence: Synthetic oligonucleotide
ataattcccgactcaacgatac

SEQ ID NO: 4238 - DNA, 21 bp, Artificial Sequence
  Description of Artificial Sequence: Synthetic oligonucleotide
ttatcgaatcccgaaacctac

SEQ ID NO: 4239 - DNA, 18 bp, Artificial Sequence
  Description of Artificial Sequence: Synthetic oligonucleotide
tttcgggcgttttaggtt

SEQ ID NO: 4240 - DNA, 33 bp, Artificial Sequence
  Description of Artificial Sequence: Synthetic oligonucleotide
agcggttttcgtgcgtttcgaaggtgggggcgg

SEQ ID NO: 4241 - DNA, 18 bp, Artificial Sequence
  Description of Artificial Sequence: Synthetic oligonucleotide
ttttcgggcgttttaggt

SEQ ID NO: 4242 - DNA, 18 bp, Artificial Sequence
  Description of Artificial Sequence: Synthetic oligonucleotide
acgcctaaaaacccgaaa

SEQ ID NO: 4243 - DNA, 18 bp, Artificial Sequence
  Description of Artificial Sequence: Synthetic oligonucleotide
taacgacgctcccaccta

SEQ ID NO: 4244 - DNA, 20 bp, Artificial Sequence
  Description of Artificial Sequence: Synthetic oligonucleotide
taggtttcgggattcgataa

SEQ ID NO: 4245 - DNA, 20 bp, Artificial Sequence
  Description of Artificial Sequence: Synthetic oligonucleotide
ttggagcgttgtttttcgta

SEQ ID NO: 4246 - DNA, 21 bp, Artificial Sequence
  Description of Artificial Sequence: Synthetic oligonucleotide
aaaccatattatcgaatcccg

SEQ ID NO: 4247 - DNA, 19 bp, Artificial Sequence
  Description of Artificial Sequence: Synthetic oligonucleotide
ttaacgacgctcccaccta

SEQ ID NO: 4248 - DNA, 21 bp, Artificial Sequence
  Description of Artificial Sequence: Synthetic oligonucleotide
attttaagttcgattcggtga

SEQ ID NO: 4249 - DNA, 18 bp, Artificial Sequence
  Description of Artificial Sequence: Synthetic oligonucleotide
aaggcgagcgagtaaagc

SEQ ID NO: 4250 - DNA, 24 bp, Artificial Sequence
  Description of Artificial Sequence: Synthetic oligonucleotide
tacgcggcggggattttcgggcgt

SEQ ID NO: 4251 - DNA, 23 bp, Artificial Sequence
  Description of Artificial Sequence: Synthetic oligonucleotide
cgcaactcacctcgatactataa

SEQ ID NO: 4252 - DNA, 20 bp, Artificial Sequence
  Description of Artificial Sequence: Synthetic oligonucleotide
gtgggagcgtcgttaatttt

SEQ ID NO: 4253 - DNA, 30 bp, Artificial Sequence
  Description of Artificial Sequence: Synthetic oligonucleotide
ttcggtcggggtaggtttcgggattcgata

SEQ ID NO: 4254 - DNA, 21 bp, Artificial Sequence
  Description of Artificial Sequence: Synthetic oligonucleotide
aaattcaccgaatcgaactta

SEQ ID NO: 4255 - DNA, 21 bp, Artificial Sequence
  Description of Artificial Sequence: Synthetic oligonucleotide
accatattatcgaatcccgaa

SEQ ID NO: 4256 - DNA, 21 bp, Artificial Sequence
  Description of Artificial Sequence: Synthetic oligonucleotide
aaccatattatcgaatcccga

SEQ ID NO: 4257 - DNA, 20 bp, Artificial Sequence
  Description of Artificial Sequence: Synthetic oligonucleotide
tcgggtttttaggcgtgtat

SEQ ID NO: 4258 - DNA, 21 bp, Artificial Sequence
  Description of Artificial Sequence: Synthetic oligonucleotide
attcccgactcaacgatactc

SEQ ID NO: 4259 - DNA, 19 bp, Artificial Sequence
  Description of Artificial Sequence: Synthetic oligonucleotide
tgggagcgtcgttaatttt

SEQ ID NO: 4260 - DNA, 19 bp, Artificial Sequence
  Description of Artificial Sequence: Synthetic oligonucleotide
gattttcgggcgttttagg

SEQ ID NO: 4261 - DNA, 19 bp, Artificial Sequence
  Description of Artificial Sequence: Synthetic oligonucleotide
ggattttcgggcgttttag

SEQ ID NO: 4262 - DNA, 22 bp, Artificial Sequence
  Description of Artificial Sequence: Synthetic oligonucleotide
agtttcgcggtttatagaggtt

SEQ ID NO: 4263 - DNA, 22 bp, Artificial Sequence
  Description of Artificial Sequence: Synthetic oligonucleotide
gaacgaccaaaactaactcgaa

SEQ ID NO: 4264 - DNA, 28 bp, Artificial Sequence
  Description of Artificial Sequence: Synthetic oligonucleotide
gtcgcgttgcgcggtttgatttagtcga

SEQ ID NO: 4265 - DNA, 22 bp, Artificial Sequence
  Description of Artificial Sequence: Synthetic oligonucleotide
aacgataatacgaacgaccaaa

SEQ ID NO: 4266 - DNA, 22 bp, Artificial Sequence
  Description of Artificial Sequence: Synthetic oligonucleotide
gtttcgcggtttatagaggttt

SEQ ID NO: 4267 - DNA, 22 bp, Artificial Sequence
  Description of Artificial Sequence: Synthetic oligonucleotide
gtagtttcgcggtttatagagg

SEQ ID NO: 4268 - DNA, 22 bp, Artificial Sequence
  Description of Artificial Sequence: Synthetic oligonucleotide
tagtttcgcggtttatagaggt

SEQ ID NO: 4269 - DNA, 22 bp, Artificial Sequence
  Description of Artificial Sequence: Synthetic oligonucleotide
acgataatacgaacgaccaaaa

SEQ ID NO: 4270 - DNA, 22 bp, Artificial Sequence
  Description of Artificial Sequence: Synthetic oligonucleotide
cgataatacgaacgaccaaaac

SEQ ID NO: 4271 - DNA, 22 bp, Artificial Sequence
  Description of Artificial Sequence: Synthetic oligonucleotide
ggtagtttcgcggtttatagag

SEQ ID NO: 4272 - DNA, 22 bp, Artificial Sequence
  Description of Artificial Sequence: Synthetic oligonucleotide
gtttaggtagtttcgcggttta

SEQ ID NO: 4273 - DNA, 22 bp, Artificial Sequence
  Description of Artificial Sequence: Synthetic oligonucleotide
gaacgataatacgaacgaccaa

SEQ ID NO: 4274 - DNA, 22 bp, Artificial Sequence
  Description of Artificial Sequence: Synthetic oligonucleotide
acgaccaaaactaactcgaaat

SEQ ID NO: 4275 - DNA, 21 bp, Artificial Sequence
  Description of Artificial Sequence: Synthetic oligonucleotide
tttcgcggtttatagaggttt

SEQ ID NO: 4276 - DNA, 21 bp, Artificial Sequence
  Description of Artificial Sequence: Synthetic oligonucleotide
tagtagggtttcgattttcgg

SEQ ID NO: 4277 - DNA, 22 bp, Artificial Sequence
  Description of Artificial Sequence: Synthetic oligonucleotide
tacacctatctataaacgcgcc

SEQ ID NO: 4278 - DNA, 26 bp, Artificial Sequence
  Description of Artificial Sequence: Synthetic oligonucleotide
tggtggttggtggaacgtgcgattgt

SEQ ID NO: 4279 - DNA, 23 bp, Artificial Sequence
  Description of Artificial Sequence: Synthetic oligonucleotide
aggtagtttcgcggtttatagag

SEQ ID NO: 4280 - DNA, 23 bp, Artificial Sequence
  Description of Artificial Sequence: Synthetic oligonucleotide
aacgaccaaaactaactcgaaat

SEQ ID NO: 4281 - DNA, 22 bp, Artificial Sequence
  Description of Artificial Sequence: Synthetic oligonucleotide
ttagtagggtttcgattttcgg

SEQ ID NO: 4282 - DNA, 21 bp, Artificial Sequence
  Description of Artificial Sequence: Synthetic oligonucleotide
ttcgcggtttatagaggtttc

SEQ ID NO: 4283 - DNA, 21 bp, Artificial Sequence
  Description of Artificial Sequence: Synthetic oligonucleotide
cgataatacgaacgaccaaaa

SEQ ID NO: 4284 - DNA, 22 bp, Artificial Sequence
  Description of Artificial Sequence: Synthetic oligonucleotide
cggtttatagaggtttcggttc

SEQ ID NO: 4285 - DNA, 21 bp, Artificial Sequence
  Description of Artificial Sequence: Synthetic oligonucleotide
gtttcgcggtttatagaggtt

SEQ ID NO: 4286 - DNA, 21 bp, Artificial Sequence
  Description of Artificial Sequence: Synthetic oligonucleotide
aacgataatacgaacgaccaa

SEQ ID NO: 4287 - DNA, 22 bp, Artificial Sequence
  Description of Artificial Sequence: Synthetic oligonucleotide
tttaggtagtttcgcggtttat

SEQ ID NO: 4288 - DNA, 21 bp, Artificial Sequence
  Description of Artificial Sequence: Synthetic oligonucleotide
gaacgataatacgaacgacca

SEQ ID NO: 4289 - DNA, 22 bp, Artificial Sequence
  Description of Artificial Sequence: Synthetic oligonucleotide
gtttatagaggtttcggttcgc

SEQ ID NO: 4290 - DNA, 22 bp, Artificial Sequence
  Description of Artificial Sequence: Synthetic oligonucleotide
tttcgcggtttatagaggtttc

SEQ ID NO: 4291 - DNA, 21 bp, Artificial Sequence
  Description of Artificial Sequence: Synthetic oligonucleotide
acgataatacgaacgaccaaa

SEQ ID NO: 4292 - DNA, 22 bp, Artificial Sequence
  Description of Artificial Sequence: Synthetic oligonucleotide
ttagttttgtatcgttcgggtt

SEQ ID NO: 4293 - DNA, 21 bp, Artificial Sequence
  Description of Artificial Sequence: Synthetic oligonucleotide
tccctcgataaatcaaaaacg

SEQ ID NO: 4294 - DNA, 47 bp, Artificial Sequence
  Description of Artificial Sequence: Synthetic oligonucleotide
tttggcgcgtttatagataggtgtatgaagatttttacgattcgaaa

SEQ ID NO: 4295 - DNA, 21 bp, Artificial Sequence
  Description of Artificial Sequence: Synthetic oligonucleotide
tttatagaggtttcggttcgc

SEQ ID NO: 4296 - DNA, 22 bp, Artificial Sequence
  Description of Artificial Sequence: Synthetic oligonucleotide
tacgaacgaccaaaactaactc

SEQ ID NO: 4297 - DNA, 20 bp, Artificial Sequence
  Description of Artificial Sequence: Synthetic oligonucleotide
agtagggtttcgattttcgg

SEQ ID NO: 4298 - DNA, 21 bp, Artificial Sequence
  Description of Artificial Sequence: Synthetic oligonucleotide
acacctatctataaacgcgcc

SEQ ID NO: 4299 - DNA, 24 bp, Artificial Sequence
  Description of Artificial Sequence: Synthetic oligonucleotide
taggtagtttcgcggtttatagag

SEQ ID NO: 4300 - DNA, 24 bp, Artificial Sequence
  Description of Artificial Sequence: Synthetic oligonucleotide
aatacgaacgaccaaaactaactc

SEQ ID NO: 4301 - DNA, 21 bp, Artificial Sequence
  Description of Artificial Sequence: Synthetic oligonucleotide
gcggtttatagaggtttcggt

SEQ ID NO: 4302 - DNA, 22 bp, Artificial Sequence
  Description of Artificial Sequence: Synthetic oligonucleotide
aactaactcgaaatcccgaact

SEQ ID NO: 4303 - DNA, 23 bp, Artificial Sequence
  Description of Artificial Sequence: Synthetic oligonucleotide
atacacctatctataaacgcgcc

SEQ ID NO: 4304 - DNA, 21 bp, Artificial Sequence
  Description of Artificial Sequence: Synthetic oligonucleotide
acctatctataaacgcgccaa

SEQ ID NO: 4305 - DNA, 23 bp, Artificial Sequence
  Description of Artificial Sequence: Synthetic oligonucleotide
atacgaacgaccaaaactaactc

SEQ ID NO: 4306 - DNA, 21 bp, Artificial Sequence
  Description of Artificial Sequence: Synthetic oligonucleotide
agtttcgcggtttatagaggt

SEQ ID NO: 4307 - DNA, 23 bp, Artificial Sequence
  Description of Artificial Sequence: Synthetic oligonucleotide
aatacgaacgaccaaaactaact

SEQ ID NO: 4308 - DNA, 21 bp, Artificial Sequence
  Description of Artificial Sequence: Synthetic oligonucleotide
cgaacgaccaaaactaactcg

SEQ ID NO: 4309 - DNA, 20 bp, Artificial Sequence
  Description of Artificial Sequence: Synthetic oligonucleotide
cctatctataaacgcgccaa

SEQ ID NO: 4310 - DNA, 22 bp, Artificial Sequence
  Description of Artificial Sequence: Synthetic oligonucleotide
gatttcgagttagttttggtcg

SEQ ID NO: 4311 - DNA, 20 bp, Artificial Sequence
  Description of Artificial Sequence: Synthetic oligonucleotide
taacttctattacccgcgcc

SEQ ID NO: 4312 - DNA, 23 bp, Artificial Sequence
  Description of Artificial Sequence: Synthetic oligonucleotide
atcgttcgcgcgggcgtatcgag

SEQ ID NO: 4313 - DNA, 20 bp, Artificial Sequence
  Description of Artificial Sequence: Synthetic oligonucleotide
cgaaatcccgaactacaaaa

SEQ ID NO: 4314 - DNA, 20 bp, Artificial Sequence
  Description of Artificial Sequence: Synthetic oligonucleotide
gggggagtcgcgttgcgcgg

SEQ ID NO: 4315 - DNA, 21 bp, Artificial Sequence
  Description of Artificial Sequence: Synthetic oligonucleotide
cgaccaaaactaactcgaaat

SEQ ID NO: 4316 - DNA, 23 bp, Artificial Sequence
  Description of Artificial Sequence: Synthetic oligonucleotide
ttaggtagtttcgcggtttatag

SEQ ID NO: 4317 - DNA, 20 bp, Artificial Sequence
  Description of Artificial Sequence: Synthetic oligonucleotide
aggtttaggtagtttcgcgg

SEQ ID NO: 4318 - DNA, 21 bp, Artificial Sequence
  Description of Artificial Sequence: Synthetic oligonucleotide
cgttaagaggcgaggaaataa

SEQ ID NO: 4319 - DNA, 21 bp, Artificial Sequence
  Description of Artificial Sequence: Synthetic oligonucleotide
cctaactcgacgcaactaacc

SEQ ID NO: 4320 - DNA, 25 bp, Artificial Sequence
  Description of Artificial Sequence: Synthetic oligonucleotide
aacggcgggcgggacgaacgattag

SEQ ID NO: 4321 - DNA, 20 bp, Artificial Sequence
  Description of Artificial Sequence: Synthetic oligonucleotide
gcggtttatagaggtttcgg

SEQ ID NO: 4322 - DNA, 22 bp, Artificial Sequence
  Description of Artificial Sequence: Synthetic oligonucleotide
taactcgaaatcccgaactaca

SEQ ID NO: 4323 - DNA, 20 bp, Artificial Sequence
  Description of Artificial Sequence: Synthetic oligonucleotide
tcgcggtttatagaggtttc

SEQ ID NO: 4324 - DNA, 20 bp, Artificial Sequence
  Description of Artificial Sequence: Synthetic oligonucleotide
ccctaactcgacgcaactaa

SEQ ID NO: 4325 - DNA, 20 bp, Artificial Sequence
  Description of Artificial Sequence: Synthetic oligonucleotide
ggtttaggtagtttcgcggt

SEQ ID NO: 4326 - DNA, 21 bp, Artificial Sequence
  Description of Artificial Sequence: Synthetic oligonucleotide
tcgaaatcccgaactacaaaa

SEQ ID NO: 4327 - DNA, 22 bp, Artificial Sequence
  Description of Artificial Sequence: Synthetic oligonucleotide
gataatacgaacgaccaaaact

SEQ ID NO: 4328 - DNA, 22 bp, Artificial Sequence
  Description of Artificial Sequence: Synthetic oligonucleotide
tagtcgaggttttgtagttcgg

SEQ ID NO: 4329 - DNA, 33 bp, Artificial Sequence
  Description of Artificial Sequence: Synthetic oligonucleotide
tagttttggtcgttcgtattatcgttcgcgcgg

SEQ ID NO: 4330 - DNA, 21 bp, Artificial Sequence
  Description of Artificial Sequence: Synthetic oligonucleotide
acgaacgaccaaaactaactc

SEQ ID NO: 4331 - DNA, 24 bp, Artificial Sequence
  Description of Artificial Sequence: Synthetic oligonucleotide
gataatacgaacgaccaaaactaa

SEQ ID NO: 4332 - DNA, 25 bp, Artificial Sequence
  Description of Artificial Sequence: Synthetic oligonucleotide
taatacgaacgaccaaaactaactc

SEQ ID NO: 4333 - DNA, 20 bp, Artificial Sequence
  Description of Artificial Sequence: Synthetic oligonucleotide
cacctatctataaacgcgcc

SEQ ID NO: 4334 - DNA, 20 bp, Artificial Sequence
  Description of Artificial Sequence: Synthetic oligonucleotide
ttcgcggtttatagaggttt

SEQ ID NO: 4335 - DNA, 21 bp, Artificial Sequence
  Description of Artificial Sequence: Synthetic oligonucleotide
cggtttatagaggtttcggtt

SEQ ID NO: 4336 - DNA, 20 bp, Artificial Sequence
  Description of Artificial Sequence: Synthetic oligonucleotide
ctcgaaatcccgaactacaa

SEQ ID NO: 4337 - DNA, 22 bp, Artificial Sequence
  Description of Artificial Sequence: Synthetic oligonucleotide
cgttaagaggcgaggaaataag

SEQ ID NO: 4338 - DNA, 21 bp, Artificial Sequence
  Description of Artificial Sequence: Synthetic oligonucleotide
ctaaccgaaaacgcgaaacta

SEQ ID NO: 4339 - DNA, 23 bp, Artificial Sequence
  Description of Artificial Sequence: Synthetic oligonucleotide
gtcgggagaggggcgcggaacgg

SEQ ID NO: 4340 - DNA, 20 bp, Artificial Sequence
  Description of Artificial Sequence: Synthetic oligonucleotide
taaccgaaaacgcgaaacta

SEQ ID NO: 4341 - DNA, 22 bp, Artificial Sequence
  Description of Artificial Sequence: Synthetic oligonucleotide
gttcgggatttcgagttagttt

SEQ ID NO: 4342 - DNA, 20 bp, Artificial Sequence
  Description of Artificial Sequence: Synthetic oligonucleotide
ttatagaggtttcggttcgc

SEQ ID NO: 4343 - DNA, 21 bp, Artificial Sequence
  Description of Artificial Sequence: Synthetic oligonucleotide
tttaggtagtttcgcggttta

SEQ ID NO: 4344 - DNA, 21 bp, Artificial Sequence
  Description of Artificial Sequence: Synthetic oligonucleotide
gagttagtgcgttcgattgtg

SEQ ID NO: 4345 - DNA, 20 bp, Artificial Sequence
  Description of Artificial Sequence: Synthetic oligonucleotide
gcctactctacttccgcgat

SEQ ID NO: 4346 - DNA, 21 bp, Artificial Sequence
  Description of Artificial Sequence: Synthetic oligonucleotide
gggggcggaaagaggcgcgtt

SEQ ID NO: 4347 - DNA, 24 bp, Artificial Sequence
  Description of Artificial Sequence: Synthetic oligonucleotide
taatacgaacgaccaaaactaact

SEQ ID NO: 4348 - DNA, 22 bp, Artificial Sequence
  Description of Artificial Sequence: Synthetic oligonucleotide
ataaaggtttcgttaagaggcg

SEQ ID NO: 4349 - DNA, 19 bp, Artificial Sequence
  Description of Artificial Sequence: Synthetic oligonucleotide
atacccctaactcgacgca

SEQ ID NO: 4350 - DNA, 23 bp, Artificial Sequence
  Description of Artificial Sequence: Synthetic oligonucleotide
tttagttttgtatcgttcgggtt

SEQ ID NO: 4351 - DNA, 20 bp, Artificial Sequence
  Description of Artificial Sequence: Synthetic oligonucleotide
cgcggtttatagaggtttcg

SEQ ID NO: 4352 - DNA, 20 bp, Artificial Sequence
  Description of Artificial Sequence: Synthetic oligonucleotide
gtcggaaggtgcgagttagt

SEQ ID NO: 4353 - DNA, 22 bp, Artificial Sequence
  Description of Artificial Sequence: Synthetic oligonucleotide
gatcgaccgaataaaaacaaat

SEQ ID NO: 4354 - DNA, 22 bp, Artificial Sequence
  Description of Artificial Sequence: Synthetic oligonucleotide
cgtttttagatcgtgattttcg

SEQ ID NO: 4355 - DNA, 20 bp, Artificial Sequence
  Description of Artificial Sequence: Synthetic oligonucleotide
actaactcgcaccttccgac

SEQ ID NO: 4356 - DNA, 22 bp, Artificial Sequence
  Description of Artificial Sequence: Synthetic oligonucleotide
aagttttgcgggcggggcgcgt

SEQ ID NO: 4357 - DNA, 22 bp, Artificial Sequence
  Description of Artificial Sequence: Synthetic oligonucleotide
atttcgagttagttttggtcgt

SEQ ID NO: 4358 - DNA, 19 bp, Artificial Sequence
  Description of Artificial Sequence: Synthetic oligonucleotide
tcggaaggtgcgagttagt

SEQ ID NO: 4359 - DNA, 19 bp, Artificial Sequence
  Description of Artificial Sequence: Synthetic oligonucleotide
gtagggtttcgattttcgg

SEQ ID NO: 4360 - DNA, 19 bp, Artificial Sequence
  Description of Artificial Sequence: Synthetic oligonucleotide
aacttctattacccgcgcc

SEQ ID NO: 4361 - DNA, 20 bp, Artificial Sequence
  Description of Artificial Sequence: Synthetic oligonucleotide
caatcgaacgcactaactcg

SEQ ID NO: 4362 - DNA, 20 bp, Artificial Sequence
  Description of Artificial Sequence: Synthetic oligonucleotide
accgaaaacgcgaaactaat

SEQ ID NO: 4363 - DNA, 21 bp, Artificial Sequence
  Description of Artificial Sequence: Synthetic oligonucleotide
agtcgggagaggggcgcggaa

SEQ ID NO: 4364 - DNA, 19 bp, Artificial Sequence
  Description of Artificial Sequence: Synthetic oligonucleotide
aaggtgcgagttagtgcgt

SEQ ID NO: 4365 - DNA, 19 bp, Artificial Sequence
  Description of Artificial Sequence: Synthetic oligonucleotide
aggtgcgagttagtgcgtt

SEQ ID NO: 4366 - DNA, 21 bp, Artificial Sequence
  Description of Artificial Sequence: Synthetic oligonucleotide
tagttttgtatcgttcgggtt

SEQ ID NO: 4367 - DNA, 22 bp, Artificial Sequence
  Description of Artificial Sequence: Synthetic oligonucleotide
ctcgataaatcaaaaacgaaaa

SEQ ID NO: 4368 - DNA, 19 bp, Artificial Sequence
  Description of Artificial Sequence: Synthetic oligonucleotide
acgcactaactcgcacctt

SEQ ID NO: 4369 - DNA, 19 bp, Artificial Sequence
  Description of Artificial Sequence: Synthetic oligonucleotide
aacgcactaactcgcacct

SEQ ID NO: 4370 - DNA, 21 bp, Artificial Sequence
  Description of Artificial Sequence: Synthetic oligonucleotide
tcgggatttcgagttagtttt

SEQ ID NO: 4371 - DNA, 21 bp, Artificial Sequence
  Description of Artificial Sequence: Synthetic oligonucleotide
ttcgggatttcgagttagttt

SEQ ID NO: 4372 - DNA, 21 bp, Artificial Sequence
  Description of Artificial Sequence: Synthetic oligonucleotide
tcgttaagaggcgaggaaata

SEQ ID NO: 4373 - DNA, 23 bp, Artificial Sequence
  Description of Artificial Sequence: Synthetic oligonucleotide
agtttcgcggtttatagaggttt

SEQ ID NO: 4374 - DNA, 19 bp, Artificial Sequence
  Description of Artificial Sequence: Synthetic oligonucleotide
aaccgcgatacccctaact

SEQ ID NO: 4375 - DNA, 21 bp, Artificial Sequence
  Description of Artificial Sequence: Synthetic oligonucleotide
aactcgaaatcccgaactaca

SEQ ID NO: 4376 - DNA, 20 bp, Artificial Sequence
  Description of Artificial Sequence: Synthetic oligonucleotide
cggtttatagaggtttcggt

SEQ ID NO: 4377 - DNA, 20 bp, Artificial Sequence
  Description of Artificial Sequence: Synthetic oligonucleotide
gaaactaatcgttcgtcccg

SEQ ID NO: 4378 - DNA, 19 bp, Artificial Sequence
  Description of Artificial Sequence: Synthetic oligonucleotide
cgggaaagtagcggtaagt

SEQ ID NO: 4379 - DNA, 22 bp, Artificial Sequence
  Description of Artificial Sequence: Synthetic oligonucleotide
ccgaactacaaaacctcgacta

SEQ ID NO: 4380 - DNA, 29 bp, Artificial Sequence
  Description of Artificial Sequence: Synthetic oligonucleotide
atagaggtttcggttcgcgttttttgggg

SEQ ID NO: 4381 - DNA, 20 bp, Artificial Sequence
  Description of Artificial Sequence: Synthetic oligonucleotide
aggcgaggaaataagagtcg

SEQ ID NO: 4382 - DNA, 21 bp, Artificial Sequence
  Description of Artificial Sequence: Synthetic oligonucleotide
ccctaactcgacgcaactaac

SEQ ID NO: 4383 - DNA, 23 bp, Artificial Sequence
  Description of Artificial Sequence: Synthetic oligonucleotide
tttagtcgaggttttgtagttcg

SEQ ID NO: 4384 - DNA, 20 bp, Artificial Sequence
  Description of Artificial Sequence: Synthetic oligonucleotide
aggtttcgttaagaggcgag

SEQ ID NO: 4385 - DNA, 21 bp, Artificial Sequence
  Description of Artificial Sequence: Synthetic oligonucleotide
actaactcgaaatcccgaact

SEQ ID NO: 4386 - DNA, 22 bp, Artificial Sequence
  Description of Artificial Sequence: Synthetic oligonucleotide
agttcgggatttcgagttagtt

SEQ ID NO: 4387 - DNA, 18 bp, Artificial Sequence
  Description of Artificial Sequence: Synthetic oligonucleotide
acttctattacccgcgcc

SEQ ID NO: 4388 - DNA, 21 bp, Artificial Sequence
  Description of Artificial Sequence: Synthetic oligonucleotide
agtcgaggttttgtagttcgg

SEQ ID NO: 4389 - DNA, 19 bp, Artificial Sequence
  Description of Artificial Sequence: Synthetic oligonucleotide
ccgaaaacgcgaaactaat

SEQ ID NO: 4390 - DNA, 25 bp, Artificial Sequence
  Description of Artificial Sequence: Synthetic oligonucleotide
ataatacgaacgaccaaaactaact

SEQ ID NO: 4391 - DNA, 19 bp, Artificial Sequence
  Description of Artificial Sequence: Synthetic oligonucleotide
gcgatacccctaactcgac

SEQ ID NO: 4392 - DNA, 20 bp, Artificial Sequence
  Description of Artificial Sequence: Synthetic oligonucleotide
acgataatacgaacgaccaa

SEQ ID NO: 4393 - DNA, 21 bp, Artificial Sequence
  Description of Artificial Sequence: Synthetic oligonucleotide
actcgaaatcccgaactacaa

SEQ ID NO: 4394 - DNA, 20 bp, Artificial Sequence
  Description of Artificial Sequence: Synthetic oligonucleotide
actaaccgaaaacgcgaaac

SEQ ID NO: 4395 - DNA, 20 bp, Artificial Sequence
  Description of Artificial Sequence: Synthetic oligonucleotide
tcgaaatcccgaactacaaa

SEQ ID NO: 4396 - DNA, 22 bp, Artificial Sequence
  Description of Artificial Sequence: Synthetic oligonucleotide
gggtcgtttttagatcgtgatt

SEQ ID NO: 4397 - DNA, 19 bp, Artificial Sequence
  Description of Artificial Sequence: Synthetic oligonucleotide
cgggtcgtttttagatcgt

SEQ ID NO: 4398 - DNA, 21 bp, Artificial Sequence
  Description of Artificial Sequence: Synthetic oligonucleotide
cacaatcgaacgcactaactc

SEQ ID NO: 4399 - DNA, 21 bp, Artificial Sequence
  Description of Artificial Sequence: Synthetic oligonucleotide
taaaggtttcgttaagaggcg

SEQ ID NO: 4400 - DNA, 19 bp, Artificial Sequence
  Description of Artificial Sequence: Synthetic oligonucleotide
tgttcggtttcggaggtag

SEQ ID NO: 4401 - DNA, 21 bp, Artificial Sequence
  Description of Artificial Sequence: Synthetic oligonucleotide
atcacgatctaaaaacgaccc

SEQ ID NO: 4402 - DNA, 30 bp, Artificial Sequence
  Description of Artificial Sequence: Synthetic oligonucleotide
ggcggcgttggagcggttagtggtagtcgg

SEQ ID NO: 4403 - DNA, 22 bp, Artificial Sequence
  Description of Artificial Sequence: Synthetic oligonucleotide
cggtttgatttagtcgaggttt

SEQ ID NO: 4404 - DNA, 40 bp, Artificial Sequence
  Description of Artificial Sequence: Synthetic oligonucleotide
ttcgggatttcgagttagttttggtcgttcgtattatcgt

SEQ ID NO: 4405 - DNA, 21 bp, Artificial Sequence
  Description of Artificial Sequence: Synthetic oligonucleotide
aaggtttcgttaagaggcgag

SEQ ID NO: 4406 - DNA, 19 bp, Artificial Sequence
  Description of Artificial Sequence: Synthetic oligonucleotide
ctaactcgcaccttccgac

SEQ ID NO: 4407 - DNA, 20 bp, Artificial Sequence
  Description of Artificial Sequence: Synthetic oligonucleotide
tcgttaagaggcgaggaaat

SEQ ID NO: 4408 - DNA, 19 bp, Artificial Sequence
  Description of Artificial Sequence: Synthetic oligonucleotide
atcgaacgcactaactcgc

SEQ ID NO: 4409 - DNA, 21 bp, Artificial Sequence
  Description of Artificial Sequence: Synthetic oligonucleotide
gttttgtagttcgggatttcg

SEQ ID NO: 4410 - DNA, 19 bp, Artificial Sequence
  Description of Artificial Sequence: Synthetic oligonucleotide
aactaaccgaaaacgcgaa

SEQ ID NO: 4411 - DNA, 19 bp, Artificial Sequence
  Description of Artificial Sequence: Synthetic oligonucleotide
aaccgaaaacgcgaaacta

SEQ ID NO: 4412 - DNA, 22 bp, Artificial Sequence
  Description of Artificial Sequence: Synthetic oligonucleotide
tctcgaaaaactctcctaaacg

SEQ ID NO: 4413 - DNA, 22 bp, Artificial Sequence
  Description of Artificial Sequence: Synthetic oligonucleotide
cgtaaagttcggtttaatttgg

SEQ ID NO: 4414 - DNA, 26 bp, Artificial Sequence
  Description of Artificial Sequence: Synthetic oligonucleotide
aggcgttatcgtcggcgtatttcgga

SEQ ID NO: 4415 - DNA, 22 bp, Artificial Sequence
  Description of Artificial Sequence: Synthetic oligonucleotide
ctcgaaaaactctcctaaacga

SEQ ID NO: 4416 - DNA, 22 bp, Artificial Sequence
  Description of Artificial Sequence: Synthetic oligonucleotide
tcgaaaaactctcctaaacgac

SEQ ID NO: 4417 - DNA, 22 bp, Artificial Sequence
  Description of Artificial Sequence: Synthetic oligonucleotide
acaccgcgactattatacgact

SEQ ID NO: 4418 - DNA, 22 bp, Artificial Sequence
  Description of Artificial Sequence: Synthetic oligonucleotide
ttcggttgttattgatcgtttt

SEQ ID NO: 4419 - DNA, 33 bp, Artificial Sequence
  Description of Artificial Sequence: Synthetic oligonucleotide
attcgttagttgttttcggagtcgagtaggttt

SEQ ID NO: 4420 - DNA, 22 bp, Artificial Sequence
  Description of Artificial Sequence: Synthetic oligonucleotide
gagttagttaggttcgtaggcg

SEQ ID NO: 4421 - DNA, 31 bp, Artificial Sequence
  Description of Artificial Sequence: Synthetic oligonucleotide
atcgtcggcgtatttcggagaagaagttttt

SEQ ID NO: 4422 - DNA, 21 bp, Artificial Sequence
  Description of Artificial Sequence: Synthetic oligonucleotide
tcgtgttcggttgttattgat

SEQ ID NO: 4423 - DNA, 21 bp, Artificial Sequence
  Description of Artificial Sequence: Synthetic oligonucleotide
gttcgtgttcggttgttattg

SEQ ID NO: 4424 - DNA, 22 bp, Artificial Sequence
  Description of Artificial Sequence: Synthetic oligonucleotide
cgaaaaactctcctaaacgact

SEQ ID NO: 4425 - DNA, 23 bp, Artificial Sequence
  Description of Artificial Sequence: Synthetic oligonucleotide
gagttagttaggttcgtaggcgt

SEQ ID NO: 4426 - DNA, 22 bp, Artificial Sequence
  Description of Artificial Sequence: Synthetic oligonucleotide
caccgcgactattatacgacta

SEQ ID NO: 4427 - DNA, 22 bp, Artificial Sequence
  Description of Artificial Sequence: Synthetic oligonucleotide
ttcgtgttcggttgttattgat

SEQ ID NO: 4428 - DNA, 22 bp, Artificial Sequence
  Description of Artificial Sequence: Synthetic oligonucleotide
tgttcggttgttattgatcgtt

SEQ ID NO: 4429 - DNA, 22 bp, Artificial Sequence
  Description of Artificial Sequence: Synthetic oligonucleotide
cttaataaaacctcgatttccg

SEQ ID NO: 4430 - DNA, 22 bp, Artificial Sequence
  Description of Artificial Sequence: Synthetic oligonucleotide
tttgtttataggcgcgttagag

SEQ ID NO: 4431 - DNA, 24 bp, Artificial Sequence
  Description of Artificial Sequence: Synthetic oligonucleotide
ggttcgagcggtgtagggttgggt

SEQ ID NO: 4432 - DNA, 23 bp, Artificial Sequence
  Description of Artificial Sequence: Synthetic oligonucleotide
ttcgtaaagttcggtttaatttg

SEQ ID NO: 4433 - DNA, 22 bp, Artificial Sequence
  Description of Artificial Sequence: Synthetic oligonucleotide
aaacaccgcgactattatacga

SEQ ID NO: 4434 - DNA, 22 bp, Artificial Sequence
  Description of Artificial Sequence: Synthetic oligonucleotide
agttagttaggttcgtaggcgt

SEQ ID NO: 4435 - DNA, 23 bp, Artificial Sequence
  Description of Artificial Sequence: Synthetic oligonucleotide
acttaataaaacctcgatttccg

SEQ ID NO: 4436 - DNA, 21 bp, Artificial Sequence
  Description of Artificial Sequence: Synthetic oligonucleotide
gtgttcggttgttattgatcg

SEQ ID NO: 4437 - DNA, 22 bp, Artificial Sequence
  Description of Artificial Sequence: Synthetic oligonucleotide
taaaacgatcaataacaaccga

SEQ ID NO: 4438 - DNA, 22 bp, Artificial Sequence
  Description of Artificial Sequence: Synthetic oligonucleotide
gtatttttcggtaagagacggc

SEQ ID NO: 4439 - DNA, 37 bp, Artificial Sequence
  Description of Artificial Sequence: Synthetic oligonucleotide
ttcgtaaggtttttcgggagttacggtttgagggcga

SEQ ID NO: 4440 - DNA, 22 bp, Artificial Sequence
  Description of Artificial Sequence: Synthetic oligonucleotide
tcgtaaagttcggtttaatttg

SEQ ID NO: 4441 - DNA, 21 bp, Artificial Sequence
  Description of Artificial Sequence: Synthetic oligonucleotide
tcggttgttattgatcgtttt

SEQ ID NO: 4442 - DNA, 23 bp, Artificial Sequence
  Description of Artificial Sequence: Synthetic oligonucleotide
acaccgcgactattatacgacta

SEQ ID NO: 4443 - DNA, 22 bp, Artificial Sequence
  Description of Artificial Sequence: Synthetic oligonucleotide
cgaacgaccaataaaaacataa

SEQ ID NO: 4444 - DNA, 22 bp, Artificial Sequence
  Description of Artificial Sequence: Synthetic oligonucleotide
gcgtatttcggagaagaagttt

SEQ ID NO: 4445 - DNA, 32 bp, Artificial Sequence
  Description of Artificial Sequence: Synthetic oligonucleotide
aggagagtttttcgagaaagatgtcgtcgttt

SEQ ID NO: 4446 - DNA, 21 bp, Artificial Sequence
  Description of Artificial Sequence: Synthetic oligonucleotide
tatttttcggtaagagacggc

SEQ ID NO: 4447 - DNA, 20 bp, Artificial Sequence
  Description of Artificial Sequence: Synthetic oligonucleotide
aatttatccttacccgaccg

SEQ ID NO: 4448 - DNA, 22 bp, Artificial Sequence
  Description of Artificial Sequence: Synthetic oligonucleotide
tcgtttaggagagtttttcgag

SEQ ID NO: 4449 - DNA, 43 bp, Artificial Sequence
  Description of Artificial Sequence: Synthetic oligonucleotide
aaagatgtcgtcgttttaatagtaatttattttcgtttcggag

SEQ ID NO: 4450 - DNA, 23 bp, Artificial Sequence
  Description of Artificial Sequence: Synthetic oligonucleotide
acgaacgaccaataaaaacataa

SEQ ID NO: 4451 - DNA, 22 bp, Artificial Sequence
  Description of Artificial Sequence: Synthetic oligonucleotide
ttaaaacgatcaataacaaccg

SEQ ID NO: 4452 - DNA, 21 bp, Artificial Sequence
  Description of Artificial Sequence: Synthetic oligonucleotide
atttatccttacccgaccgac

SEQ ID NO: 4453 - DNA, 22 bp, Artificial Sequence
  Description of Artificial Sequence: Synthetic oligonucleotide
tatttgtttataggcgcgttag

SEQ ID NO: 4454 - DNA, 23 bp, Artificial Sequence
  Description of Artificial Sequence: Synthetic oligonucleotide
gttcggttgttattgatcgtttt

SEQ ID NO: 4455 - DNA, 23 bp, Artificial Sequence
  Description of Artificial Sequence: Synthetic oligonucleotide
gttaaaacgatcaataacaaccg

SEQ ID NO: 4456 - DNA, 21 bp, Artificial Sequence
  Description of Artificial Sequence: Synthetic oligonucleotide
ttgtttataggcgcgttagag

SEQ ID NO: 4457 - DNA, 21 bp, Artificial Sequence
  Description of Artificial Sequence: Synthetic oligonucleotide
actctaatcgctcgcactacc

SEQ ID NO: 4458 - DNA, 22 bp, Artificial Sequence
  Description of Artificial Sequence: Synthetic oligonucleotide
attaagttttatggtcgcggtt

SEQ ID NO: 4459 - DNA, 26 bp, Artificial Sequence
  Description of Artificial Sequence: Synthetic oligonucleotide
ttcgcgttaagtcgggttcggtgcgt

SEQ ID NO: 4460 - DNA, 21 bp, Artificial Sequence
  Description of Artificial Sequence: Synthetic oligonucleotide
aacaccgcgactattatacga

SEQ ID NO: 4461 - DNA, 22 bp, Artificial Sequence
  Description of Artificial Sequence: Synthetic oligonucleotide
ccgcgactattatacgactaaa

SEQ ID NO: 4462 - DNA, 20 bp, Artificial Sequence
  Description of Artificial Sequence: Synthetic oligonucleotide
gaccaactacgtcgaaccaa

SEQ ID NO: 4463 - DNA, 22 bp, Artificial Sequence
  Description of Artificial Sequence: Synthetic oligonucleotide
gttcggttgttattgatcgttt

SEQ ID NO: 4464 - DNA, 20 bp, Artificial Sequence
  Description of Artificial Sequence: Synthetic oligonucleotide
cgttcgtgttcggttgttat

SEQ ID NO: 4465 - DNA, 23 bp, Artificial Sequence
  Description of Artificial Sequence: Synthetic oligonucleotide
aacaccgcgactattatacgact

SEQ ID NO: 4466 - DNA, 21 bp, Artificial Sequence
  Description of Artificial Sequence: Synthetic oligonucleotide
acgaacctaaccgtaaaaacg

SEQ ID NO: 4467 - DNA, 23 bp, Artificial Sequence
  Description of Artificial Sequence: Synthetic oligonucleotide
ttgggtcgtaagttttatagtcg

SEQ ID NO: 4468 - DNA, 26 bp, Artificial Sequence
  Description of Artificial Sequence: Synthetic oligonucleotide
ggaagcgcgttcggaaatcgaggttt

SEQ ID NO: 4469 - DNA, 23 bp, Artificial Sequence
  Description of Artificial Sequence: Synthetic oligonucleotide
accgcgactattatacgactaaa

SEQ ID NO: 4470 - DNA, 20 bp, Artificial Sequence
  Description of Artificial Sequence: Synthetic oligonucleotide
accaactacgtcgaaccaaa

SEQ ID NO: 4471 - DNA, 22 bp, Artificial Sequence
  Description of Artificial Sequence: Synthetic oligonucleotide
tcggttgttattgatcgtttta

SEQ ID NO: 4472 - DNA, 23 bp, Artificial Sequence
  Description of Artificial Sequence: Synthetic oligonucleotide
atttgtttataggcgcgttagag

SEQ ID NO: 4473 - DNA, 21 bp, Artificial Sequence
  Description of Artificial Sequence: Synthetic oligonucleotide
aattaagttttatggtcgcgg

SEQ ID NO: 4474 - DNA, 22 bp, Artificial Sequence
  Description of Artificial Sequence: Synthetic oligonucleotide
caactctaatcgctcgcactac

SEQ ID NO: 4475 - DNA, 21 bp, Artificial Sequence
  Description of Artificial Sequence: Synthetic oligonucleotide
taagttttatggtcgcggttt

SEQ ID NO: 4476 - DNA, 21 bp, Artificial Sequence
  Description of Artificial Sequence: Synthetic oligonucleotide
ttaagttttatggtcgcggtt

SEQ ID NO: 4477 - DNA, 22 bp, Artificial Sequence
  Description of Artificial Sequence: Synthetic oligonucleotide
tatatttgtttataggcgcgtt

SEQ ID NO: 4478 - DNA, 21 bp, Artificial Sequence
  Description of Artificial Sequence: Synthetic oligonucleotide
aaaacgatcaataacaaccga

SEQ ID NO: 4479 - DNA, 23 bp, Artificial Sequence
  Description of Artificial Sequence: Synthetic oligonucleotide
atatttgtttataggcgcgttag

SEQ ID NO: 4480 - DNA, 20 bp, Artificial Sequence
  Description of Artificial Sequence: Synthetic oligonucleotide
atttttcggtaagagacggc

SEQ ID NO: 4481 - DNA, 20 bp, Artificial Sequence
  Description of Artificial Sequence: Synthetic oligonucleotide
aaccgaaactttacaacccg

SEQ ID NO: 4482 - DNA, 22 bp, Artificial Sequence
  Description of Artificial Sequence: Synthetic oligonucleotide
atttttgttgttcgcgttaagt

SEQ ID NO: 4483 - DNA, 28 bp, Artificial Sequence
  Description of Artificial Sequence: Synthetic oligonucleotide
ggacggtagtgcgagcgattagagttgg

SEQ ID NO: 4484 - DNA, 20 bp, Artificial Sequence
  Description of Artificial Sequence: Synthetic oligonucleotide
tttatccttacccgaccgac

SEQ ID NO: 4485 - DNA, 22 bp, Artificial Sequence
  Description of Artificial Sequence: Synthetic oligonucleotide
tgggtcgtaagttttatagtcg

SEQ ID NO: 4486 - DNA, 22 bp, Artificial Sequence
  Description of Artificial Sequence: Synthetic oligonucleotide
gttttatggtcgcggtttttag

SEQ ID NO: 4487 - DNA, 22 bp, Artificial Sequence
  Description of Artificial Sequence: Synthetic oligonucleotide
agttttatggtcgcggttttta

SEQ ID NO: 4488 - DNA, 22 bp, Artificial Sequence
  Description of Artificial Sequence: Synthetic oligonucleotide
aacgaacgaccaataaaaacat

SEQ ID NO: 4489 - DNA, 21 bp, Artificial Sequence
  Description of Artificial Sequence: Synthetic oligonucleotide
ggcgtatttcggagaagaagt

SEQ ID NO: 4490 - DNA, 22 bp, Artificial Sequence
  Description of Artificial Sequence: Synthetic oligonucleotide
agtcgtttaggagagtttttcg

SEQ ID NO: 4491 - DNA, 22 bp, Artificial Sequence
  Description of Artificial Sequence: Synthetic oligonucleotide
actcgactccgaaaacaactaa

SEQ ID NO: 4492 - DNA, 19 bp, Artificial Sequence
  Description of Artificial Sequence: Synthetic oligonucleotide
gcgtttcgttcgtaaggtt

SEQ ID NO: 4493 - DNA, 34 bp, Artificial Sequence
  Description of Artificial Sequence: Synthetic oligonucleotide
gttcgtgttcggttgttattgatcgttttaacgt

SEQ ID NO: 4494 - DNA, 20 bp, Artificial Sequence
  Description of Artificial Sequence: Synthetic oligonucleotide
ctctaatcgctcgcactacc

SEQ ID NO: 4495 - DNA, 19 bp, Artificial Sequence
  Description of Artificial Sequence: Synthetic oligonucleotide
tccgaaccccgactaataa

SEQ ID NO: 4496 - DNA, 22 bp, Artificial Sequence
  Description of Artificial Sequence: Synthetic oligonucleotide
tagtaattttgtttcgggtcgt

SEQ ID NO: 4497 - DNA, 21 bp, Artificial Sequence
  Description of Artificial Sequence: Synthetic oligonucleotide
ctcgaaccaactctaatcgct

SEQ ID NO: 4498 - DNA, 23 bp, Artificial Sequence
  Description of Artificial Sequence: Synthetic oligonucleotide
cgactataaaacttacgacccaa

SEQ ID NO: 4499 - DNA, 21 bp, Artificial Sequence
  Description of Artificial Sequence: Synthetic oligonucleotide
cggaaaagcggtgtttattag

SEQ ID NO: 4500 - DNA, 23 bp, Artificial Sequence
  Description of Artificial Sequence: Synthetic oligonucleotide
agcggtgaagggttcgagcggtg

SEQ ID NO: 4501 - DNA, 20 bp, Artificial Sequence
  Description of Artificial Sequence: Synthetic oligonucleotide
tttatggtcgcggtttttag

SEQ ID NO: 4502 - DNA, 21 bp, Artificial Sequence
  Description of Artificial Sequence: Synthetic oligonucleotide
ttttatggtcgcggtttttag

SEQ ID NO: 4503 - DNA, 22 bp, Artificial Sequence
  Description of Artificial Sequence: Synthetic oligonucleotide
aatttttgttgttcgcgttaag

SEQ ID NO: 4504 - DNA, 22 bp, Artificial Sequence
  Description of Artificial Sequence: Synthetic oligonucleotide
ctactcgactccgaaaacaact

SEQ ID NO: 4505 - DNA, 21 bp, Artificial Sequence
  Description of Artificial Sequence: Synthetic oligonucleotide
tgtttataggcgcgttagagc

SEQ ID NO: 4506 - DNA, 19 bp, Artificial Sequence
  Description of Artificial Sequence: Synthetic oligonucleotide
accgaaactttacaacccg

SEQ ID NO: 4507 - DNA, 22 bp, Artificial Sequence
  Description of Artificial Sequence: Synthetic oligonucleotide
gaattaagttttatggtcgcgg

SEQ ID NO: 4508 - DNA, 22 bp, Artificial Sequence
  Description of Artificial Sequence: Synthetic oligonucleotide
ttaagttttatggtcgcggttt

SEQ ID NO: 4509 - DNA, 21 bp, Artificial Sequence
  Description of Artificial Sequence: Synthetic oligonucleotide
ttaataaaacctcgatttccg

SEQ ID NO: 4510 - DNA, 21 bp, Artificial Sequence
  Description of Artificial Sequence: Synthetic oligonucleotide
cgaaacctcgaaccaactcta

SEQ ID NO: 4511 - DNA, 22 bp, Artificial Sequence
  Description of Artificial Sequence: Synthetic oligonucleotide
aaacttcttctccgaaatacgc

SEQ ID NO: 4512 - DNA, 20 bp, Artificial Sequence
  Description of Artificial Sequence: Synthetic oligonucleotide
gtcgaggtttttgtaggtcg

SEQ ID NO: 4513 - DNA, 33 bp, Artificial Sequence
  Description of Artificial Sequence: Synthetic oligonucleotide
tttggagttagttaggttcgtaggcgttatcgt

SEQ ID NO: 4514 - DNA, 22 bp, Artificial Sequence
  Description of Artificial Sequence: Synthetic oligonucleotide
aactctaatcgctcgcactacc

SEQ ID NO: 4515 - DNA, 21 bp, Artificial Sequence
  Description of Artificial Sequence: Synthetic oligonucleotide
cgttcgtgttcggttgttatt

SEQ ID NO: 4516 - DNA, 20 bp, Artificial Sequence
  Description of Artificial Sequence: Synthetic oligonucleotide
ttccgaaccccgactaataa

SEQ ID NO: 4517 - DNA, 21 bp, Artificial Sequence
  Description of Artificial Sequence: Synthetic oligonucleotide
agttagttaggttcgtaggcg

SEQ ID NO: 4518 - DNA, 20 bp, Artificial Sequence
  Description of Artificial Sequence: Synthetic oligonucleotide
aacctaaccgtaaaaacgcc

SEQ ID NO: 4519 - DNA, 23 bp, Artificial Sequence
  Description of Artificial Sequence: Synthetic oligonucleotide
gtcgtttaggagagtttttcgag

SEQ ID NO: 4520 - DNA, 19 bp, Artificial Sequence
  Description of Artificial Sequence: Synthetic oligonucleotide
ttatccttacccgaccgac

SEQ ID NO: 4521 - DNA, 24 bp, Artificial Sequence
  Description of Artificial Sequence: Synthetic oligonucleotide
aacttaataaaacctcgatttccg

SEQ ID NO: 4522 - DNA, 19 bp, Artificial Sequence
  Description of Artificial Sequence: Synthetic oligonucleotide
tttttcggtaagagacggc

SEQ ID NO: 4523 - DNA, 21 bp, Artificial Sequence
  Description of Artificial Sequence: Synthetic oligonucleotide
tcgaaaaactctcctaaacga

SEQ ID NO: 4524 - DNA, 19 bp, Artificial Sequence
  Description of Artificial Sequence: Synthetic oligonucleotide
tcgggagttacggtttgag

SEQ ID NO: 4525 - DNA, 23 bp, Artificial Sequence
  Description of Artificial Sequence: Synthetic oligonucleotide
acgactataaaacttacgaccca

SEQ ID NO: 4526 - DNA, 25 bp, Artificial Sequence
  Description of Artificial Sequence: Synthetic oligonucleotide
ggtgaagggttcgagcggtgtaggg

SEQ ID NO: 4527 - DNA, 27 bp, Artificial Sequence
  Description of Artificial Sequence: Synthetic oligonucleotide
ggagttacggtttgagggcgattcggg

SEQ ID NO: 4528 - DNA, 21 bp, Artificial Sequence
  Description of Artificial Sequence: Synthetic oligonucleotide
cgaaaaactctcctaaacgac

SEQ ID NO: 4529 - DNA, 20 bp, Artificial Sequence
  Description of Artificial Sequence: Synthetic oligonucleotide
aagttttatggtcgcggttt

SEQ ID NO: 4530 - DNA, 20 bp, Artificial Sequence
  Description of Artificial Sequence: Synthetic oligonucleotide
cgacctacaaaaacctcgac

SEQ ID NO: 4531 - DNA, 22 bp, Artificial Sequence
  Description of Artificial Sequence: Synthetic oligonucleotide
gtagtgcgagcgattagagttg

SEQ ID NO: 4532 - DNA, 28 bp, Artificial Sequence
  Description of Artificial Sequence: Synthetic oligonucleotide
ttcggttgggttaagtcgcgtagcgcgg

SEQ ID NO: 4533 - DNA, 21 bp, Artificial Sequence
  Description of Artificial Sequence: Synthetic oligonucleotide
accaactacgtcgaaccaaaa

SEQ ID NO: 4534 - DNA, 21 bp, Artificial Sequence
  Description of Artificial Sequence: Synthetic oligonucleotide
ccgaaatcgcaatctaaaact

SEQ ID NO: 4535 - DNA, 23 bp, Artificial Sequence
  Description of Artificial Sequence: Synthetic oligonucleotide
aaaacaccgcgactattatacga

SEQ ID NO: 4536 - DNA, 20 bp, Artificial Sequence
  Description of Artificial Sequence: Synthetic oligonucleotide
gtttataggcgcgttagagc

SEQ ID NO: 4537 - DNA, 21 bp, Artificial Sequence
  Description of Artificial Sequence: Synthetic oligonucleotide
ttttgttgttcgcgttaagtc

SEQ ID NO: 4538 - DNA, 21 bp, Artificial Sequence
  Description of Artificial Sequence: Synthetic oligonucleotide
aacttcttctccgaaatacgc

SEQ ID NO: 4539 - DNA, 21 bp, Artificial Sequence
  Description of Artificial Sequence: Synthetic oligonucleotide
tagtgcgagcgattagagttg

SEQ ID NO: 4540 - DNA, 19 bp, Artificial Sequence
  Description of Artificial Sequence: Synthetic oligonucleotide
ccgaaactttacaacccga

SEQ ID NO: 4541 - DNA, 19 bp, Artificial Sequence
  Description of Artificial Sequence: Synthetic oligonucleotide
cgttatcgtcggcgtattt

SEQ ID NO: 4542 - DNA, 20 bp, Artificial Sequence
  Description of Artificial Sequence: Synthetic oligonucleotide
ttttattccccgctaacgac

SEQ ID NO: 4543 - DNA, 22 bp, Artificial Sequence
  Description of Artificial Sequence: Synthetic oligonucleotide
tttcggtaaattcgtaggtttt

SEQ ID NO: 4544 - DNA, 37 bp, Artificial Sequence
  Description of Artificial Sequence: Synthetic oligonucleotide
tacgatggcggggcggcggcgcgaatatataaaggag

SEQ ID NO: 4545 - DNA, 20 bp, Artificial Sequence
  Description of Artificial Sequence: Synthetic oligonucleotide
ccaactacgtcgaaccaaaa

SEQ ID NO: 4546 - DNA, 20 bp, Artificial Sequence
  Description of Artificial Sequence: Synthetic oligonucleotide
cgtgttcggttgttattgat

SEQ ID NO: 4547 - DNA, 20 bp, Artificial Sequence
  Description of Artificial Sequence: Synthetic oligonucleotide
cgaacctaaccgtaaaaacg

SEQ ID NO: 4548 - DNA, 22 bp, Artificial Sequence
  Description of Artificial Sequence: Synthetic oligonucleotide
ccaaattaaaccgaactttacg

SEQ ID NO: 4549 - DNA, 19 bp, Artificial Sequence
  Description of Artificial Sequence: Synthetic oligonucleotide
ttgggttaagtcgcgtagc

SEQ ID NO: 4550 - DNA, 35 bp, Artificial Sequence
  Description of Artificial Sequence: Synthetic oligonucleotide
ggtttttgtaggtcgcgaagttgtttaaatttcgt

SEQ ID NO: 4551 - DNA, 21 bp, Artificial Sequence
  Description of Artificial Sequence: Synthetic oligonucleotide
gttcgtaaggtttttcgggag

SEQ ID NO: 4552 - DNA, 24 bp, Artificial Sequence
  Description of Artificial Sequence: Synthetic oligonucleotide
ttcgggcgattcggtcgttcgtgt

SEQ ID NO: 4553 - DNA, 20 bp, Artificial Sequence
  Description of Artificial Sequence: Synthetic oligonucleotide
cgaaccaactctaatcgctc

SEQ ID NO: 4554 - DNA, 20 bp, Artificial Sequence
  Description of Artificial Sequence: Synthetic oligonucleotide
gaaccaactctaatcgctcg

SEQ ID NO: 4555 - DNA, 20 bp, Artificial Sequence
  Description of Artificial Sequence: Synthetic oligonucleotide
tcgaaccaactctaatcgct

SEQ ID NO: 4556 - DNA, 21 bp, Artificial Sequence
  Description of Artificial Sequence: Synthetic oligonucleotide
tcgaaccaactctaatcgctc

SEQ ID NO: 4557 - DNA, 22 bp, Artificial Sequence
  Description of Artificial Sequence: Synthetic oligonucleotide
acgatcaataacaaccgaacac

SEQ ID NO: 4558 - DNA, 20 bp, Artificial Sequence
  Description of Artificial Sequence: Synthetic oligonucleotide
gcgtttcgttcgtaaggttt

SEQ ID NO: 4559 - DNA, 20 bp, Artificial Sequence
  Description of Artificial Sequence: Synthetic oligonucleotide
gcgtatttcggagaagaagt

SEQ ID NO: 4560 - DNA, 23 bp, Artificial Sequence
  Description of Artificial Sequence: Synthetic oligonucleotide
tagtcgtttaggagagtttttcg

SEQ ID NO: 4561 - DNA, 19 bp, Artificial Sequence
  Description of Artificial Sequence: Synthetic oligonucleotide
gattcggtcgttcgtgttc

SEQ ID NO: 4562 - DNA, 24 bp, Artificial Sequence
  Description of Artificial Sequence: Synthetic oligonucleotide
aacaccgcgactattatacgacta

SEQ ID NO: 4563 - DNA, 23 bp, Artificial Sequence
  Description of Artificial Sequence: Synthetic oligonucleotide
ttcggttgttattgatcgtttta

SEQ ID NO: 4564 - DNA, 19 bp, Artificial Sequence
  Description of Artificial Sequence: Synthetic oligonucleotide
cttccgaaccccgactaat

SEQ ID NO: 4565 - DNA, 20 bp, Artificial Sequence
  Description of Artificial Sequence: Synthetic oligonucleotide
aattattagtcggggttcgg

SEQ ID NO: 4566 - DNA, 31 bp, Artificial Sequence
  Description of Artificial Sequence: Synthetic oligonucleotide
agcgcgttcggaaatcgaggttttattaagt

SEQ ID NO: 4567 - DNA, 23 bp, Artificial Sequence
  Description of Artificial Sequence: Synthetic oligonucleotide
tactcgactccgaaaacaactaa

SEQ ID NO: 4568 - DNA, 20 bp, Artificial Sequence
  Description of Artificial Sequence: Synthetic oligonucleotide
cctcgaaccaactctaatcg

SEQ ID NO: 4569 - DNA, 21 bp, Artificial Sequence
  Description of Artificial Sequence: Synthetic oligonucleotide
cgatcaataacaaccgaacac

SEQ ID NO: 4570 - DNA, 23 bp, Artificial Sequence
  Description of Artificial Sequence: Synthetic oligonucleotide
gttagttaggttcgtaggcgtta

SEQ ID NO: 4571 - DNA, 19 bp, Artificial Sequence
  Description of Artificial Sequence: Synthetic oligonucleotide
tcgtaaggtttttcgggag

SEQ ID NO: 4572 - DNA, 21 bp, Artificial Sequence
  Description of Artificial Sequence: Synthetic oligonucleotide
ggtagtgcgagcgattagagt

SEQ ID NO: 4573 - DNA, 20 bp, Artificial Sequence
  Description of Artificial Sequence: Synthetic oligonucleotide
ttcgtaaggtttttcgggag

SEQ ID NO: 4574 - DNA, 19 bp, Artificial Sequence
  Description of Artificial Sequence: Synthetic oligonucleotide
cgaggtttttgtaggtcgc

SEQ ID NO: 4575 - DNA, 22 bp, Artificial Sequence
  Description of Artificial Sequence: Synthetic oligonucleotide
tttttgttgttcgcgttaagtc

SEQ ID NO: 4576 - DNA, 21 bp, Artificial Sequence
  Description of Artificial Sequence: Synthetic oligonucleotide
gtttcgggttgtaaagtttcg

SEQ ID NO: 4577 - DNA, 24 bp, Artificial Sequence
  Description of Artificial Sequence: Synthetic oligonucleotide
ttgggttaagtcgcgtagcgcggt

SEQ ID NO: 4578 - DNA, 21 bp, Artificial Sequence
  Description of Artificial Sequence: Synthetic oligonucleotide
agtaattttgtttcgggtcgt

SEQ ID NO: 4579 - DNA, 21 bp, Artificial Sequence
  Description of Artificial Sequence: Synthetic oligonucleotide
gaacctaaccgtaaaaacgcc

SEQ ID NO: 4580 - DNA, 19 bp, Artificial Sequence
  Description of Artificial Sequence: Synthetic oligonucleotide
ctacaaaaacctcgacccg

SEQ ID NO: 4581 - DNA, 22 bp, Artificial Sequence
  Description of Artificial Sequence: Synthetic oligonucleotide
gttcgtgttcggttgttattga

SEQ ID NO: 4582 - DNA, 21 bp, Artificial Sequence
  Description of Artificial Sequence: Synthetic oligonucleotide
atttttattccccgctaacga

SEQ ID NO: 4583 - DNA, 23 bp, Artificial Sequence
  Description of Artificial Sequence: Synthetic oligonucleotide
atttcggtaaattcgtaggtttt

SEQ ID NO: 4584 - DNA, 19 bp, Artificial Sequence
  Description of Artificial Sequence: Synthetic oligonucleotide
accaactacgtcgaaccaa

SEQ ID NO: 4585 - DNA, 24 bp, Artificial Sequence
  Description of Artificial Sequence: Synthetic oligonucleotide
gttgggtcgtaagttttatagtcg

SEQ ID NO: 4586 - DNA, 23 bp, Artificial Sequence
  Description of Artificial Sequence: Synthetic oligonucleotide
taatttttgttgttcgcgttaag

SEQ ID NO: 4587 - DNA, 22 bp, Artificial Sequence
  Description of Artificial Sequence: Synthetic oligonucleotide
ctcgactccgaaaacaactaac

SEQ ID NO: 4588 - DNA, 18 bp, Artificial Sequence
  Description of Artificial Sequence: Synthetic oligonucleotide
tcgggagttacggtttga

SEQ ID NO: 4589 - DNA, 22 bp, Artificial Sequence
  Description of Artificial Sequence: Synthetic oligonucleotide
gataacgcctacgaacctaact

SEQ ID NO: 4590 - DNA, 19 bp, Artificial Sequence
  Description of Artificial Sequence: Synthetic oligonucleotide
cgggtcgaggtttttgtag

SEQ ID NO: 4591 - DNA, 37 bp, Artificial Sequence
  Description of Artificial Sequence: Synthetic oligonucleotide
ggttttgatttatcgttgttttttcgtaaagttcggt

SEQ ID NO: 4592 - DNA, 24 bp, Artificial Sequence
  Description of Artificial Sequence: Synthetic oligonucleotide
ttagtcgtttaggagagtttttcg

SEQ ID NO: 4593 - DNA, 19 bp, Artificial Sequence
  Description of Artificial Sequence: Synthetic oligonucleotide
cgaaacctactcgactccg

SEQ ID NO: 4594 - DNA, 31 bp, Artificial Sequence
  Description of Artificial Sequence: Synthetic oligonucleotide
gatcgttttaacgtcgttagggacgattcgt

SEQ ID NO: 4595 - DNA, 20 bp, Artificial Sequence
  Description of Artificial Sequence: Synthetic oligonucleotide
tcgtgttcggttgttattga

SEQ ID NO: 4596 - DNA, 19 bp, Artificial Sequence
  Description of Artificial Sequence: Synthetic oligonucleotide
ccaactacgtcgaaccaaa

SEQ ID NO: 4597 - DNA, 20 bp, Artificial Sequence
  Description of Artificial Sequence: Synthetic oligonucleotide
tttttattccccgctaacga

SEQ ID NO: 4598 - DNA, 21 bp, Artificial Sequence
  Description of Artificial Sequence: Synthetic oligonucleotide
acctcgaaccaactctaatcg

SEQ ID NO: 4599 - DNA, 19 bp, Artificial Sequence
  Description of Artificial Sequence: Synthetic oligonucleotide
cggtttttagggtgagtcg

SEQ ID NO: 4600 - DNA, 19 bp, Artificial Sequence
  Description of Artificial Sequence: Synthetic oligonucleotide
cgcgacctacaaaaacctc

SEQ ID NO: 4601 - DNA, 19 bp, Artificial Sequence
  Description of Artificial Sequence: Synthetic oligonucleotide
gcgacctacaaaaacctcg

SEQ ID NO: 4602 - DNA, 21 bp, Artificial Sequence
  Description of Artificial Sequence: Synthetic oligonucleotide
gaaacctactcgactccgaaa

SEQ ID NO: 4603 - DNA, 19 bp, Artificial Sequence
  Description of Artificial Sequence: Synthetic oligonucleotide
cgttcgtgttcggttgtta

SEQ ID NO: 4604 - DNA, 31 bp, Artificial Sequence
  Description of Artificial Sequence: Synthetic oligonucleotide
atcgttttaacgtcgttagggacgattcgtt

SEQ ID NO: 4605 - DNA, 23 bp, Artificial Sequence
  Description of Artificial Sequence: Synthetic oligonucleotide
aaacgaacgaccaataaaaacat

SEQ ID NO: 4606 - DNA, 22 bp, Artificial Sequence
  Description of Artificial Sequence: Synthetic oligonucleotide
aacgatcaataacaaccgaaca

SEQ ID NO: 4607 - DNA, 24 bp, Artificial Sequence
  Description of Artificial Sequence: Synthetic oligonucleotide
tacgactataaaacttacgaccca

SEQ ID NO: 4608 - DNA, 37 bp, Artificial Sequence
  Description of Artificial Sequence: Synthetic oligonucleotide
ttacgatggcggggcggcggcgcgaatatataaagga

SEQ ID NO: 4609 - DNA, 19 bp, Artificial Sequence
  Description of Artificial Sequence: Synthetic oligonucleotide
ccgaccaactacgtcgaac

SEQ ID NO: 4610 - DNA, 23 bp, Artificial Sequence
  Description of Artificial Sequence: Synthetic oligonucleotide
ttaaaacgatcaataacaaccga

SEQ ID NO: 4611 - DNA, 18 bp, Artificial Sequence
  Description of Artificial Sequence: Synthetic oligonucleotide
tgggttaagtcgcgtagc

SEQ ID NO: 4612 - DNA, 21 bp, Artificial Sequence
  Description of Artificial Sequence: Synthetic oligonucleotide
cgtatttcggagaagaagttt

SEQ ID NO: 4613 - DNA, 18 bp, Artificial Sequence
  Description of Artificial Sequence: Synthetic oligonucleotide
ttccgaaccccgactaat

SEQ ID NO: 4614 - DNA, 19 bp, Artificial Sequence
  Description of Artificial Sequence: Synthetic oligonucleotide
accaactctaatcgctcgc

SEQ ID NO: 4615 - DNA, 18 bp, Artificial Sequence
  Description of Artificial Sequence: Synthetic oligonucleotide
agttacggtttgagggcg

SEQ ID NO: 4616 - DNA, 22 bp, Artificial Sequence
  Description of Artificial Sequence: Synthetic oligonucleotide
acgcctacgaacctaactaact

SEQ ID NO: 4617 - DNA, 19 bp, Artificial Sequence
  Description of Artificial Sequence: Synthetic oligonucleotide
tatggtcgcggtttttagg

SEQ ID NO: 4618 - DNA, 22 bp, Artificial Sequence
  Description of Artificial Sequence: Synthetic oligonucleotide
gactccgaaaacaactaacgaa

SEQ ID NO: 4619 - DNA, 20 bp, Artificial Sequence
  Description of Artificial Sequence: Synthetic oligonucleotide
tttcgggttgtaaagtttcg

SEQ ID NO: 4620 - DNA, 20 bp, Artificial Sequence
  Description of Artificial Sequence: Synthetic oligonucleotide
cggttgttattgatcgtttt

SEQ ID NO: 4621 - DNA, 22 bp, Artificial Sequence
  Description of Artificial Sequence: Synthetic oligonucleotide
aacctcgaaccaactctaatcg

SEQ ID NO: 4622 - DNA, 20 bp, Artificial Sequence
  Description of Artificial Sequence: Synthetic oligonucleotide
gttcgtaaggtttttcggga

SEQ ID NO: 4623 - DNA, 25 bp, Artificial Sequence
  Description of Artificial Sequence: Synthetic oligonucleotide
tacggtttgagggcgattcgggcga

SEQ ID NO: 4624 - DNA, 19 bp, Artificial Sequence
  Description of Artificial Sequence: Synthetic oligonucleotide
tttattccccgctaacgac

SEQ ID NO: 4625 - DNA, 21 bp, Artificial Sequence
  Description of Artificial Sequence: Synthetic oligonucleotide
tttacgatggcggggcggcgg

SEQ ID NO: 4626 - DNA, 25 bp, Artificial Sequence
  Description of Artificial Sequence: Synthetic oligonucleotide
gtacgactataaaacttacgaccca

SEQ ID NO: 4627 - DNA, 19 bp, Artificial Sequence
  Description of Artificial Sequence: Synthetic oligonucleotide
tatccttacccgaccgacc

SEQ ID NO: 4628 - DNA, 21 bp, Artificial Sequence
  Description of Artificial Sequence: Synthetic oligonucleotide
ctcgactccgaaaacaactaa

SEQ ID NO: 4629 - DNA, 39 bp, Artificial Sequence
  Description of Artificial Sequence: Synthetic oligonucleotide
gttcggaaatcgaggttttattaagttttagattgcgat

SEQ ID NO: 4630 - DNA, 20 bp, Artificial Sequence
  Description of Artificial Sequence: Synthetic oligonucleotide
agtgcgagcgattagagttg

SEQ ID NO: 4631 - DNA, 21 bp, Artificial Sequence
  Description of Artificial Sequence: Synthetic oligonucleotide
acctactcgactccgaaaaca

SEQ ID NO: 4632 - DNA, 20 bp, Artificial Sequence
  Description of Artificial Sequence: Synthetic oligonucleotide
cgcgtaacgaaaccttttat

SEQ ID NO: 4633 - DNA, 19 bp, Artificial Sequence
  Description of Artificial Sequence: Synthetic oligonucleotide
gttacggtttgagggcgat

SEQ ID NO: 4634 - DNA, 21 bp, Artificial Sequence
  Description of Artificial Sequence: Synthetic oligonucleotide
gttcggttgttattgatcgtt

SEQ ID NO: 4635 - DNA, 21 bp, Artificial Sequence
  Description of Artificial Sequence: Synthetic oligonucleotide
cgtttaggagagtttttcgag

SEQ ID NO: 4636 - DNA, 18 bp, Artificial Sequence
  Description of Artificial Sequence: Synthetic oligonucleotide
ctacaccgctcgaaccct

SEQ ID NO: 4637 - DNA, 37 bp, Artificial Sequence
  Description of Artificial Sequence: Synthetic oligonucleotide
tttttatatatttgtttataggcgcgttagagcggtg

SEQ ID NO: 4638 - DNA, 21 bp, Artificial Sequence
  Description of Artificial Sequence: Synthetic oligonucleotide
gttttatggtcgcggttttta

SEQ ID NO: 4639 - DNA, 20 bp, Artificial Sequence
  Description of Artificial Sequence: Synthetic oligonucleotide
ctttacaacccgaaacctcg

SEQ ID NO: 4640 - DNA, 21 bp, Artificial Sequence
  Description of Artificial Sequence: Synthetic oligonucleotide
tttaatttttgttgttcgcgt

SEQ ID NO: 4641 - DNA, 23 bp, Artificial Sequence
  Description of Artificial Sequence: Synthetic oligonucleotide
cgcgactattatacgactaaaaa

SEQ ID NO: 4642 - DNA, 18 bp, Artificial Sequence
  Description of Artificial Sequence: Synthetic oligonucleotide
tacggtttgagggcgatt

SEQ ID NO: 4643 - DNA, 18 bp, Artificial Sequence
  Description of Artificial Sequence: Synthetic oligonucleotide
ttacggtttgagggcgat

SEQ ID NO: 4644 - DNA, 19 bp, Artificial Sequence
  Description of Artificial Sequence: Synthetic oligonucleotide
tttacaacccgaaacctcg

SEQ ID NO: 4645 - DNA, 20 bp, Artificial Sequence
  Description of Artificial Sequence: Synthetic oligonucleotide
cctactcgactccgaaaaca

SEQ ID NO: 4646 - DNA, 18 bp, Artificial Sequence
  Description of Artificial Sequence: Synthetic oligonucleotide
attcggtcgttcgtgttc

SEQ ID NO: 4647 - DNA, 20 bp, Artificial Sequence
  Description of Artificial Sequence: Synthetic oligonucleotide
ttatggtcgcggtttttagg

SEQ ID NO: 4648 - DNA, 20 bp, Artificial Sequence
  Description of Artificial Sequence: Synthetic oligonucleotide
aaccaactctaatcgctcgc

SEQ ID NO: 4649 - DNA, 22 bp, Artificial Sequence
  Description of Artificial Sequence: Synthetic oligonucleotide
tttcgataggaatttgtcgttt

SEQ ID NO: 4650 - DNA, 21 bp, Artificial Sequence
  Description of Artificial Sequence: Synthetic oligonucleotide
gaaacgcgctctaatttcaac

SEQ ID NO: 4651 - DNA, 29 bp, Artificial Sequence
  Description of Artificial Sequence: Synthetic oligonucleotide
ttgttcggtttgggatggttgtgcgcggt

SEQ ID NO: 4652 - DNA, 22 bp, Artificial Sequence
  Description of Artificial Sequence: Synthetic oligonucleotide
cgtttaatagggatggaacgag

SEQ ID NO: 4653 - DNA, 22 bp, Artificial Sequence
  Description of Artificial Sequence: Synthetic oligonucleotide
aaaacaatacgataaaaacccg

SEQ ID NO: 4654 - DNA, 23 bp, Artificial Sequence
  Description of Artificial Sequence: Synthetic oligonucleotide
tgcgtgagcggtcgggttgagtt

SEQ ID NO: 4655 - DNA, 21 bp, Artificial Sequence
  Description of Artificial Sequence: Synthetic oligonucleotide
cggtgtaagtcgttgggtatt

SEQ ID NO: 4656 - DNA, 22 bp, Artificial Sequence
  Description of Artificial Sequence: Synthetic oligonucleotide
catctaacaatctcgtcgaacc

SEQ ID NO: 4657 - DNA, 28 bp, Artificial Sequence
  Description of Artificial Sequence: Synthetic oligonucleotide
ttcggattttgtagcgcggtatttcggg

SEQ ID NO: 4658 - DNA, 22 bp, Artificial Sequence
  Description of Artificial Sequence: Synthetic oligonucleotide
atctaacaatctcgtcgaacca

SEQ ID NO: 4659 - DNA, 22 bp, Artificial Sequence
  Description of Artificial Sequence: Synthetic oligonucleotide
tcgataggaatttgtcgtttgt

SEQ ID NO: 4660 - DNA, 22 bp, Artificial Sequence
  Description of Artificial Sequence: Synthetic oligonucleotide
aacaatacgataaaaacccgtc

SEQ ID NO: 4661 - DNA, 20 bp, Artificial Sequence
  Description of Artificial Sequence: Synthetic oligonucleotide
tggttttcggtgtaagtcgt

SEQ ID NO: 4662 - DNA, 20 bp, Artificial Sequence
  Description of Artificial Sequence: Synthetic oligonucleotide
aaacgcgctctaatttcaac

SEQ ID NO: 4663 - DNA, 21 bp, Artificial Sequence
  Description of Artificial Sequence: Synthetic oligonucleotide
tcggtgtaagtcgttgggtat

SEQ ID NO: 4664 - DNA, 22 bp, Artificial Sequence
  Description of Artificial Sequence: Synthetic oligonucleotide
cgataggaatttgtcgtttgta

SEQ ID NO: 4665 - DNA, 21 bp, Artificial Sequence
  Description of Artificial Sequence: Synthetic oligonucleotide
cgtttaatagggatggaacga

SEQ ID NO: 4666 - DNA, 22 bp, Artificial Sequence
  Description of Artificial Sequence: Synthetic oligonucleotide
acaatacgataaaaacccgtcc

SEQ ID NO: 4667 - DNA, 22 bp, Artificial Sequence
  Description of Artificial Sequence: Synthetic oligonucleotide
tctaacaatctcgtcgaaccac

SEQ ID NO: 4668 - DNA, 22 bp, Artificial Sequence
  Description of Artificial Sequence: Synthetic oligonucleotide
ttcgataggaatttgtcgtttg

SEQ ID NO: 4669 - DNA, 22 bp, Artificial Sequence
  Description of Artificial Sequence: Synthetic oligonucleotide
aaacaatacgataaaaacccgt

SEQ ID NO: 4670 - DNA, 19 bp, Artificial Sequence
  Description of Artificial Sequence: Synthetic oligonucleotide
acgcgctctaatttcaacc

SEQ ID NO: 4671 - DNA, 21 bp, Artificial Sequence
  Description of Artificial Sequence: Synthetic oligonucleotide
gattcgagcgtagcgtttatc

SEQ ID NO: 4672 - DNA, 23 bp, Artificial Sequence
  Description of Artificial Sequence: Synthetic oligonucleotide
cgttaaatacccaacgacttaca

SEQ ID NO: 4673 - DNA, 27 bp, Artificial Sequence
  Description of Artificial Sequence: Synthetic oligonucleotide
ttcgaagggtcgggattcggtttgagt

SEQ ID NO: 4674 - DNA, 21 bp, Artificial Sequence
  Description of Artificial Sequence: Synthetic oligonucleotide
ggttttcggtgtaagtcgttg

SEQ ID NO: 4675 - DNA, 21 bp, Artificial Sequence
  Description of Artificial Sequence: Synthetic oligonucleotide
gttttcggtgtaagtcgttgg

SEQ ID NO: 4676 - DNA, 21 bp, Artificial Sequence
  Description of Artificial Sequence: Synthetic oligonucleotide
ttggttttcggtgtaagtcgt

SEQ ID NO: 4677 - DNA, 21 bp, Artificial Sequence
  Description of Artificial Sequence: Synthetic oligonucleotide
caatacgataaaaacccgtcc

SEQ ID NO: 4678 - DNA, 20 bp, Artificial Sequence
  Description of Artificial Sequence: Synthetic oligonucleotide
gacgtttcggattttgtagc

SEQ ID NO: 4679 - DNA, 32 bp, Artificial Sequence
  Description of Artificial Sequence: Synthetic oligonucleotide
gtatttcgggttatcgattcggtaaaggtcgg

SEQ ID NO: 4680 - DNA, 22 bp, Artificial Sequence
  Description of Artificial Sequence: Synthetic oligonucleotide
gtcgttggttagagacgttgtt

SEQ ID NO: 4681 - DNA, 19 bp, Artificial Sequence
  Description of Artificial Sequence: Synthetic oligonucleotide
cgaaacccaaatcgttacc

SEQ ID NO: 4682 - DNA, 24 bp, Artificial Sequence
  Description of Artificial Sequence: Synthetic oligonucleotide
ggcgagcgtggattaggagagcgg

SEQ ID NO: 4683 - DNA, 20 bp, Artificial Sequence
  Description of Artificial Sequence: Synthetic oligonucleotide
ttttcggtgtaagtcgttgg

SEQ ID NO: 4684 - DNA, 21 bp, Artificial Sequence
  Description of Artificial Sequence: Synthetic oligonucleotide
tctaacaatctcgtcgaacca

SEQ ID NO: 4685 - DNA, 23 bp, Artificial Sequence
  Description of Artificial Sequence: Synthetic oligonucleotide
taaaacaatacgataaaaacccg

SEQ ID NO: 4686 - DNA, 20 bp, Artificial Sequence
  Description of Artificial Sequence: Synthetic oligonucleotide
ggacgtttcggattttgtag

SEQ ID NO: 4687 - DNA, 21 bp, Artificial Sequence
  Description of Artificial Sequence: Synthetic oligonucleotide
ccgtctcgttaaatacccaac

SEQ ID NO: 4688 - DNA, 20 bp, Artificial Sequence
  Description of Artificial Sequence: Synthetic oligonucleotide
aacgcgctctaatttcaacc

SEQ ID NO: 4689 - DNA, 21 bp, Artificial Sequence
  Description of Artificial Sequence: Synthetic oligonucleotide
ctaacaatctcgtcgaaccac

SEQ ID NO: 4690 - DNA, 20 bp, Artificial Sequence
  Description of Artificial Sequence: Synthetic oligonucleotide
cggattttagaggggtaacg

SEQ ID NO: 4691 - DNA, 22 bp, Artificial Sequence
  Description of Artificial Sequence: Synthetic oligonucleotide
tacaaacgacaaattcctatcg

SEQ ID NO: 4692 - DNA, 24 bp, Artificial Sequence
  Description of Artificial Sequence: Synthetic oligonucleotide
agagcgagggttttcgcgcgaaga

SEQ ID NO: 4693 - DNA, 23 bp, Artificial Sequence
  Description of Artificial Sequence: Synthetic oligonucleotide
ctacaaacgacaaattcctatcg

SEQ ID NO: 4694 - DNA, 23 bp, Artificial Sequence
  Description of Artificial Sequence: Synthetic oligonucleotide
cacatctaacaatctcgtcgaac

SEQ ID NO: 4695 - DNA, 22 bp, Artificial Sequence
  Description of Artificial Sequence: Synthetic oligonucleotide
caaacgacaaattcctatcgaa

SEQ ID NO: 4696 - DNA, 19 bp, Artificial Sequence
  Description of Artificial Sequence: Synthetic oligonucleotide
gtagtaaatgggcgtgcgt

SEQ ID NO: 4697 - DNA, 22 bp, Artificial Sequence
  Description of Artificial Sequence: Synthetic oligonucleotide
acgaaacgcttaaaccaaacta

SEQ ID NO: 4698 - DNA, 25 bp, Artificial Sequence
  Description of Artificial Sequence: Synthetic oligonucleotide
ttcgcgggggacgggtttttatcgt

SEQ ID NO: 4699 - DNA, 19 bp, Artificial Sequence
  Description of Artificial Sequence: Synthetic oligonucleotide
cgaaacgcgctctaatttc

SEQ ID NO: 4700 - DNA, 22 bp, Artificial Sequence
  Description of Artificial Sequence: Synthetic oligonucleotide
tcgttggttagagacgttgttt

SEQ ID NO: 4701 - DNA, 21 bp, Artificial Sequence
  Description of Artificial Sequence: Synthetic oligonucleotide
aatacccaacgacttacaccg

SEQ ID NO: 4702 - DNA, 22 bp, Artificial Sequence
  Description of Artificial Sequence: Synthetic oligonucleotide
acatctaacaatctcgtcgaac

SEQ ID NO: 4703 - DNA, 22 bp, Artificial Sequence
  Description of Artificial Sequence: Synthetic oligonucleotide
cgttggttagagacgttgttta

SEQ ID NO: 4704 - DNA, 20 bp, Artificial Sequence
  Description of Artificial Sequence: Synthetic oligonucleotide
attcgagcgtagcgtttatc

SEQ ID NO: 4705 - DNA, 24 bp, Artificial Sequence
  Description of Artificial Sequence: Synthetic oligonucleotide
ctaaaacaatacgataaaaacccg

SEQ ID NO: 4706 - DNA, 23 bp, Artificial Sequence
  Description of Artificial Sequence: Synthetic oligonucleotide
cgataggaatttgtcgtttgtag

SEQ ID NO: 4707 - DNA, 20 bp, Artificial Sequence
  Description of Artificial Sequence: Synthetic oligonucleotide
acgacttacaccgaaaacca

SEQ ID NO: 4708 - DNA, 22 bp, Artificial Sequence
  Description of Artificial Sequence: Synthetic oligonucleotide
cgaaacgcttaaaccaaactaa

SEQ ID NO: 4709 - DNA, 20 bp, Artificial Sequence
  Description of Artificial Sequence: Synthetic oligonucleotide
ttggttttcggtgtaagtcg

SEQ ID NO: 4710 - DNA, 26 bp, Artificial Sequence
  Description of Artificial Sequence: Synthetic oligonucleotide
tgggtatttaacgagacgggggcgtt

SEQ ID NO: 4711 - DNA, 19 bp, Artificial Sequence
  Description of Artificial Sequence: Synthetic oligonucleotide
gcgcgaagatttaaggaag

SEQ ID NO: 4712 - DNA, 24 bp, Artificial Sequence
  Description of Artificial Sequence: Synthetic oligonucleotide
ggcgtggaggatttgggcgtttgg

SEQ ID NO: 4713 - DNA, 30 bp, Artificial Sequence
  Description of Artificial Sequence: Synthetic oligonucleotide
gatttgggcgtttgggaaggtgtatttcga

SEQ ID NO: 4714 - DNA, 18 bp, Artificial Sequence
  Description of Artificial Sequence: Synthetic oligonucleotide
tagtaaatgggcgtgcgt

SEQ ID NO: 4715 - DNA, 20 bp, Artificial Sequence
  Description of Artificial Sequence: Synthetic oligonucleotide
gtcgtttgtagtttttgcgg

SEQ ID NO: 4716 - DNA, 21 bp, Artificial Sequence
  Description of Artificial Sequence: Synthetic oligonucleotide
atacccaacgacttacaccga

SEQ ID NO: 4717 - DNA, 21 bp, Artificial Sequence
  Description of Artificial Sequence: Synthetic oligonucleotide
gtagtttttgcggttttcgtt

SEQ ID NO: 4718 - DNA, 19 bp, Artificial Sequence
  Description of Artificial Sequence: Synthetic oligonucleotide
cgcgaagatttaaggaagg

SEQ ID NO: 4719 - DNA, 19 bp, Artificial Sequence
  Description of Artificial Sequence: Synthetic oligonucleotide
gtaagagcgagggttttcg

SEQ ID NO: 4720 - DNA, 19 bp, Artificial Sequence
  Description of Artificial Sequence: Synthetic oligonucleotide
tttcggtgtaagtcgttgg

SEQ ID NO: 4721 - DNA, 23 bp, Artificial Sequence
  Description of Artificial Sequence: Synthetic oligonucleotide
tggttagagacgttgtttagacg

SEQ ID NO: 4722 - DNA, 21 bp, Artificial Sequence
  Description of Artificial Sequence: Synthetic oligonucleotide
aacgaaaaccgcaaaaactac

SEQ ID NO: 4723 - DNA, 33 bp, Artificial Sequence
  Description of Artificial Sequence: Synthetic oligonucleotide
tgggaaggtgtatttcgataggaatttgtcgtt

SEQ ID NO: 4724 - DNA, 20 bp, Artificial Sequence
  Description of Artificial Sequence: Synthetic oligonucleotide
gctacaaaatccgaaacgtc

SEQ ID NO: 4725 - DNA, 34 bp, Artificial Sequence
  Description of Artificial Sequence: Synthetic oligonucleotide
ttcggtgtaagtcgttgggtatttaacgagacgg

SEQ ID NO: 4726 - DNA, 21 bp, Artificial Sequence
  Description of Artificial Sequence: Synthetic oligonucleotide
tgtagtttttgcggttttcgt

SEQ ID NO: 4727 - DNA, 22 bp, Artificial Sequence
  Description of Artificial Sequence: Synthetic oligonucleotide
cgtggttagatttttcgatttg

SEQ ID NO: 4728 - DNA, 19 bp, Artificial Sequence
  Description of Artificial Sequence: Synthetic oligonucleotide
ctaccgccgacgaactcta

SEQ ID NO: 4729 - DNA, 26 bp, Artificial Sequence
  Description of Artificial Sequence: Synthetic oligonucleotide
ggttgcgttttttagtagggcggggg

SEQ ID NO: 4730 - DNA, 22 bp, Artificial Sequence
  Description of Artificial Sequence: Synthetic oligonucleotide
gtcgtggttagatttttcgatt

SEQ ID NO: 4731 - DNA, 18 bp, Artificial Sequence
  Description of Artificial Sequence: Synthetic oligonucleotide
taccgccgacgaactcta

SEQ ID NO: 4732 - DNA, 22 bp, Artificial Sequence
  Description of Artificial Sequence: Synthetic oligonucleotide
cgcgaacacgtctactaactaa

SEQ ID NO: 4733 - DNA, 22 bp, Artificial Sequence
  Description of Artificial Sequence: Synthetic oligonucleotide
tcggagtttaagtcgttgtttt

SEQ ID NO: 4734 - DNA, 34 bp, Artificial Sequence
  Description of Artificial Sequence: Synthetic oligonucleotide
ttttggtttacgttcgtttattcgcgtttgagta

SEQ ID NO: 4735 - DNA, 22 bp, Artificial Sequence
  Description of Artificial Sequence: Synthetic oligonucleotide
ttcggagtttaagtcgttgttt

SEQ ID NO: 4736 - DNA, 22 bp, Artificial Sequence
  Description of Artificial Sequence: Synthetic oligonucleotide
cggagtttaagtcgttgttttt

SEQ ID NO: 4737 - DNA, 22 bp, Artificial Sequence
  Description of Artificial Sequence: Synthetic oligonucleotide
gattcggagtttaagtcgttgt

SEQ ID NO: 4738 - DNA, 22 bp, Artificial Sequence
  Description of Artificial Sequence: Synthetic oligonucleotide
cgacaaaaacctaccgtctaca

SEQ ID NO: 4739 - DNA, 22 bp, Artificial Sequence
  Description of Artificial Sequence: Synthetic oligonucleotide
ttcggatcgcgtatagttattt

SEQ ID NO: 4740 - DNA, 22 bp, Artificial Sequence
  Description of Artificial Sequence: Synthetic oligonucleotide
ggcggaggcgggagtcgtaggg

SEQ ID NO: 4741 - DNA, 22 bp, Artificial Sequence
  Description of Artificial Sequence: Synthetic oligonucleotide
tcggatcgcgtatagttatttt

SEQ ID NO: 4742 - DNA, 21 bp, Artificial Sequence
  Description of Artificial Sequence: Synthetic oligonucleotide
ctaccgtctacaacccctacg

SEQ ID NO: 4743 - DNA, 20 bp, Artificial Sequence
  Description of Artificial Sequence: Synthetic oligonucleotide
gtcgcgcgtcgaggcggagg

SEQ ID NO: 4744 - DNA, 23 bp, Artificial Sequence
  Description of Artificial Sequence: Synthetic oligonucleotide
attcggagtttaagtcgttgttt

SEQ ID NO: 4745 - DNA, 21 bp, Artificial Sequence
  Description of Artificial Sequence: Synthetic oligonucleotide
cgatccgaatttcttcctaac

SEQ ID NO: 4746 - DNA, 22 bp, Artificial Sequence
  Description of Artificial Sequence: Synthetic oligonucleotide
tattagttagttcggcggtttt

SEQ ID NO: 4747 - DNA, 30 bp, Artificial Sequence
  Description of Artificial Sequence: Synthetic oligonucleotide
tttttattatcggcgcggttcgttagtcga

SEQ ID NO: 4748 - DNA, 23 bp, Artificial Sequence
  Description of Artificial Sequence: Synthetic oligonucleotide
agattcggagtttaagtcgttgt

SEQ ID NO: 4749 - DNA, 22 bp, Artificial Sequence
  Description of Artificial Sequence: Synthetic oligonucleotide
ccgacaaaaacctaccgtctac

SEQ ID NO: 4750 - DNA, 22 bp, Artificial Sequence
  Description of Artificial Sequence: Synthetic oligonucleotide
ccgaatctaaacaaaaacgaaa

SEQ ID NO: 4751 - DNA, 21 bp, Artificial Sequence
  Description of Artificial Sequence: Synthetic oligonucleotide
gagtcgtaggggttgtagacg

SEQ ID NO: 4752 - DNA, 37 bp, Artificial Sequence
  Description of Artificial Sequence: Synthetic oligonucleotide
aggtttttgtcggggtatatttttttaagcgtttagg

SEQ ID NO: 4753 - DNA, 23 bp, Artificial Sequence
  Description of Artificial Sequence: Synthetic oligonucleotide
gaacacgtctactaactaacgcc

SEQ ID NO: 4754 - DNA, 22 bp, Artificial Sequence
  Description of Artificial Sequence: Synthetic oligonucleotide
tttcgtttttgtttagattcgg

SEQ ID NO: 4755 - DNA, 22 bp, Artificial Sequence
  Description of Artificial Sequence: Synthetic oligonucleotide
gctaaacacctaacgaaacgaa

SEQ ID NO: 4756 - DNA, 21 bp, Artificial Sequence
  Description of Artificial Sequence: Synthetic oligonucleotide
gaggattcgtcgatttttgtc

SEQ ID NO: 4757 - DNA, 29 bp, Artificial Sequence
  Description of Artificial Sequence: Synthetic oligonucleotide
gtcggtggttcgggatatcgcgttataga

SEQ ID NO: 4758 - DNA, 22 bp, Artificial Sequence
  Description of Artificial Sequence: Synthetic oligonucleotide
tcgtttttgtttagattcggag

SEQ ID NO: 4759 - DNA, 22 bp, Artificial Sequence
  Description of Artificial Sequence: Synthetic oligonucleotide
actccgaatctaaacaaaaacg

SEQ ID NO: 4760 - DNA, 23 bp, Artificial Sequence
  Description of Artificial Sequence: Synthetic oligonucleotide
gtattagttagttcggcggtttt

SEQ ID NO: 4761 - DNA, 21 bp, Artificial Sequence
  Description of Artificial Sequence: Synthetic oligonucleotide
ttatcgcggttaggaagaaat

SEQ ID NO: 4762 - DNA, 27 bp, Artificial Sequence
  Description of Artificial Sequence: Synthetic oligonucleotide
tttagatcgagtagtcgcgcgtcgagg

SEQ ID NO: 4763 - DNA, 22 bp, Artificial Sequence
  Description of Artificial Sequence: Synthetic oligonucleotide
ctaactctcgatacaaaccgct

SEQ ID NO: 4764 - DNA, 24 bp, Artificial Sequence
  Description of Artificial Sequence: Synthetic oligonucleotide
ggttatatttgataatttcgtcgg

SEQ ID NO: 4765 - DNA, 25 bp, Artificial Sequence
  Description of Artificial Sequence: Synthetic oligonucleotide
gagtcggtggttcgggatatcgcgt

SEQ ID NO: 4766 - DNA, 22 bp, Artificial Sequence
  Description of Artificial Sequence: Synthetic oligonucleotide
tttatcgcggttaggaagaaat

SEQ ID NO: 4767 - DNA, 21 bp, Artificial Sequence
  Description of Artificial Sequence: Synthetic oligonucleotide
gttaggaagaaattcggatcg

SEQ ID NO: 4768 - DNA, 20 bp, Artificial Sequence
  Description of Artificial Sequence: Synthetic oligonucleotide
taccgtctacaacccctacg

SEQ ID NO: 4769 - DNA, 22 bp, Artificial Sequence
  Description of Artificial Sequence: Synthetic oligonucleotide
tccgaatctaaacaaaaacgaa

SEQ ID NO: 4770 - DNA, 21 bp, Artificial Sequence
  Description of Artificial Sequence: Synthetic oligonucleotide
cgtattagttagttcggcggt

SEQ ID NO: 4771 - DNA, 22 bp, Artificial Sequence
  Description of Artificial Sequence: Synthetic oligonucleotide
attagttagttcggcggttttg

SEQ ID NO: 4772 - DNA, 21 bp, Artificial Sequence
  Description of Artificial Sequence: Synthetic oligonucleotide
ccgcgaacacgtctactaact

SEQ ID NO: 4773 - DNA, 20 bp, Artificial Sequence
  Description of Artificial Sequence: Synthetic oligonucleotide
accgcgaacacgtctactaa

SEQ ID NO: 4774 - DNA, 20 bp, Artificial Sequence
  Description of Artificial Sequence: Synthetic oligonucleotide
ttcgtcgatttttgtcgagt

SEQ ID NO: 4775 - DNA, 32 bp, Artificial Sequence
  Description of Artificial Sequence: Synthetic oligonucleotide
ttcgggatatcgcgttatagaattcgaggcgt

SEQ ID NO: 4776 - DNA, 22 bp, Artificial Sequence
  Description of Artificial Sequence: Synthetic oligonucleotide
ctcgatacaaaccgctaaacac

SEQ ID NO: 4777 - DNA, 22 bp, Artificial Sequence
  Description of Artificial Sequence: Synthetic oligonucleotide
agattcggagtttaagtcgttg

SEQ ID NO: 4778 - DNA, 22 bp, Artificial Sequence
  Description of Artificial Sequence: Synthetic oligonucleotide
aacacgtctactaactaacgcc

SEQ ID NO: 4779 - DNA, 22 bp, Artificial Sequence
  Description of Artificial Sequence: Synthetic oligonucleotide
tcaaaacctataactacgtccg

SEQ ID NO: 4780 - DNA, 22 bp, Artificial Sequence
  Description of Artificial Sequence: Synthetic oligonucleotide
ttggtttacgttcgtttattcg

SEQ ID NO: 4781 - DNA, 30 bp, Artificial Sequence
  Description of Artificial Sequence: Synthetic oligonucleotide
agcggcgttagttagtagacgtgttcgcgg

SEQ ID NO: 4782 - DNA, 23 bp, Artificial Sequence
  Description of Artificial Sequence: Synthetic oligonucleotide
caaaacctataactacgtccgaa

SEQ ID NO: 4783 - DNA, 21 bp, Artificial Sequence
  Description of Artificial Sequence: Synthetic oligonucleotide
tcgtttattcgcgtttgagta

SEQ ID NO: 4784 - DNA, 21 bp, Artificial Sequence
  Description of Artificial Sequence: Synthetic oligonucleotide
atccgaatttcttcctaaccg

SEQ ID NO: 4785 - DNA, 22 bp, Artificial Sequence
  Description of Artificial Sequence: Synthetic oligonucleotide
cggttttggttatagacgtttg

SEQ ID NO: 4786 - DNA, 21 bp, Artificial Sequence
  Description of Artificial Sequence: Synthetic oligonucleotide
tggtttacgttcgtttattcg

SEQ ID NO: 4787 - DNA, 24 bp, Artificial Sequence
  Description of Artificial Sequence: Synthetic oligonucleotide
tagattcggagtttaagtcgttgt

SEQ ID NO: 4788 - DNA, 21 bp, Artificial Sequence
  Description of Artificial Sequence: Synthetic oligonucleotide
cgtttattcgcgtttgagtag

SEQ ID NO: 4789 - DNA, 21 bp, Artificial Sequence
  Description of Artificial Sequence: Synthetic oligonucleotide
tcgatacaaaccgctaaacac

SEQ ID NO: 4790 - DNA, 22 bp, Artificial Sequence
  Description of Artificial Sequence: Synthetic oligonucleotide
taactctcgatacaaaccgcta

SEQ ID NO: 4791 - DNA, 20 bp, Artificial Sequence
  Description of Artificial Sequence: Synthetic oligonucleotide
tagttagttcggcggttttg

SEQ ID NO: 4792 - DNA, 22 bp, Artificial Sequence
  Description of Artificial Sequence: Synthetic oligonucleotide
ttcgtttattcgcgtttgagta

SEQ ID NO: 4793 - DNA, 22 bp, Artificial Sequence
  Description of Artificial Sequence: Synthetic oligonucleotide
tcgtttattcgcgtttgagtag

SEQ ID NO: 4794 - DNA, 22 bp, Artificial Sequence
  Description of Artificial Sequence: Synthetic oligonucleotide
aaaatcgtaactaaactccccg

SEQ ID NO: 4795 - DNA, 20 bp, Artificial Sequence
  Description of Artificial Sequence: Synthetic oligonucleotide
tttgttgggaaacgtagtcg

SEQ ID NO: 4796 - DNA, 33 bp, Artificial Sequence
  Description of Artificial Sequence: Synthetic oligonucleotide
tttcgagttgggatagcggttgttttttgaaaa

SEQ ID NO: 4797 - DNA, 22 bp, Artificial Sequence
  Description of Artificial Sequence: Synthetic oligonucleotide
tcgaaatccgatctaaacctct

SEQ ID NO: 4798 - DNA, 20 bp, Artificial Sequence
  Description of Artificial Sequence: Synthetic oligonucleotide
attcgtcgatttttgtcgag

SEQ ID NO: 4799 - DNA, 34 bp, Artificial Sequence
  Description of Artificial Sequence: Synthetic oligonucleotide
ttcgtttcgttaggtgtttagcggtttgtatcga

SEQ ID NO: 4800 - DNA, 23 bp, Artificial Sequence
  Description of Artificial Sequence: Synthetic oligonucleotide
ttttggtttacgttcgtttattc

SEQ ID NO: 4801 - DNA, 21 bp, Artificial Sequence
  Description of Artificial Sequence: Synthetic oligonucleotide
aatttcttcctaaccgcgata

SEQ ID NO: 4802 - DNA, 22 bp, Artificial Sequence
  Description of Artificial Sequence: Synthetic oligonucleotide
ttaggcgtattagttagttcgg

SEQ ID NO: 4803 - DNA, 44 bp, Artificial Sequence
  Description of Artificial Sequence: Synthetic oligonucleotide
ttttggttatagacgtttgaatgataaagtgtttttattatcgg

SEQ ID NO: 4804 - DNA, 21 bp, Artificial Sequence
  Description of Artificial Sequence: Synthetic oligonucleotide
ttagttagttcggcggttttg

SEQ ID NO: 4805 - DNA, 23 bp, Artificial Sequence
  Description of Artificial Sequence: Synthetic oligonucleotide
atcaaaacctataactacgtccg

SEQ ID NO: 4806 - DNA, 21 bp, Artificial Sequence
  Description of Artificial Sequence: Synthetic oligonucleotide
ggtttacgttcgtttattcgc

SEQ ID NO: 4807 - DNA, 24 bp, Artificial Sequence
  Description of Artificial Sequence: Synthetic oligonucleotide
aaacctataactacgtccgaaaat

SEQ ID NO: 4808 - DNA, 22 bp, Artificial Sequence
  Description of Artificial Sequence: Synthetic oligonucleotide
gcgtttgagtagcgtttttaat

SEQ ID NO: 4809 - DNA, 31 bp, Artificial Sequence
  Description of Artificial Sequence: Synthetic oligonucleotide
ggcgttagttagtagacgtgttcgcggtcgt

SEQ ID NO: 4810 - DNA, 20 bp, Artificial Sequence
  Description of Artificial Sequence: Synthetic oligonucleotide
gaggattcgtcgatttttgt

SEQ ID NO: 4811 - DNA, 21 bp, Artificial Sequence
  Description of Artificial Sequence: Synthetic oligonucleotide
ttttatcgcggttaggaagaa

SEQ ID NO: 4812 - DNA, 21 bp, Artificial Sequence
  Description of Artificial Sequence: Synthetic oligonucleotide
tttttatcgcggttaggaaga

SEQ ID NO: 4813 - DNA, 22 bp, Artificial Sequence
  Description of Artificial Sequence: Synthetic oligonucleotide
atttcttcctaaccgcgataaa

SEQ ID NO: 4814 - DNA, 22 bp, Artificial Sequence
  Description of Artificial Sequence: Synthetic oligonucleotide
cgaaatccgatctaaacctctc

SEQ ID NO: 4815 - DNA, 21 bp, Artificial Sequence
  Description of Artificial Sequence: Synthetic oligonucleotide
gcggttttggttatagacgtt

SEQ ID NO: 4816 - DNA, 20 bp, Artificial Sequence
  Description of Artificial Sequence: Synthetic oligonucleotide
cgtattagttagttcggcgg

SEQ ID NO: 4817 - DNA, 23 bp, Artificial Sequence
  Description of Artificial Sequence: Synthetic oligonucleotide
cggatcgcgtatagttattttag

SEQ ID NO: 4818 - DNA, 21 bp, Artificial Sequence
  Description of Artificial Sequence: Synthetic oligonucleotide
gtttattcgcgtttgagtagc

SEQ ID NO: 4819 - DNA, 20 bp, Artificial Sequence
  Description of Artificial Sequence: Synthetic oligonucleotide
cgatccgaatttcttcctaa

SEQ ID NO: 4820 - DNA, 21 bp, Artificial Sequence
  Description of Artificial Sequence: Synthetic oligonucleotide
ttcgtttttgtttagattcgg

SEQ ID NO: 4821 - DNA, 21 bp, Artificial Sequence
  Description of Artificial Sequence: Synthetic oligonucleotide
cgaaatccgatctaaacctct

SEQ ID NO: 4822 - DNA, 24 bp, Artificial Sequence
  Description of Artificial Sequence: Synthetic oligonucleotide
aaaacctataactacgtccgaaaa

SEQ ID NO: 4823 - DNA, 22 bp, Artificial Sequence
  Description of Artificial Sequence: Synthetic oligonucleotide
tttggtttacgttcgtttattc

SEQ ID NO: 4824 - DNA, 22 bp, Artificial Sequence
  Description of Artificial Sequence: Synthetic oligonucleotide
ttttggtttacgttcgtttatt

SEQ ID NO: 4825 - DNA, 20 bp, Artificial Sequence
  Description of Artificial Sequence: Synthetic oligonucleotide
ggaggattcgtcgatttttg

SEQ ID NO: 4826 - DNA, 27 bp, Artificial Sequence
  Description of Artificial Sequence: Synthetic oligonucleotide
agtcggtggttcgggatatcgcgttat

SEQ ID NO: 4827 - DNA, 20 bp, Artificial Sequence
  Description of Artificial Sequence: Synthetic oligonucleotide
tccgaatttcttcctaaccg

SEQ ID NO: 4828 - DNA, 20 bp, Artificial Sequence
  Description of Artificial Sequence: Synthetic oligonucleotide
aggattcgtcgatttttgtc

SEQ ID NO: 4829 - DNA, 23 bp, Artificial Sequence
  Description of Artificial Sequence: Synthetic oligonucleotide
cgacgataaaacctacgaataaa

SEQ ID NO: 4830 - DNA, 21 bp, Artificial Sequence
  Description of Artificial Sequence: Synthetic oligonucleotide
gttagtagacgtgttcgcggt

SEQ ID NO: 4831 - DNA, 44 bp, Artificial Sequence
  Description of Artificial Sequence: Synthetic oligonucleotide
ttttaaattttcggacgtagttataggttttgatagttttaggg

SEQ ID NO: 4832 - DNA, 23 bp, Artificial Sequence
  Description of Artificial Sequence: Synthetic oligonucleotide
tagattcggagtttaagtcgttg

SEQ ID NO: 4833 - DNA, 22 bp, Artificial Sequence
  Description of Artificial Sequence: Synthetic oligonucleotide
tctcgatacaaaccgctaaaca

SEQ ID NO: 4834 - DNA, 23 bp, Artificial Sequence
  Description of Artificial Sequence: Synthetic oligonucleotide
aacctataactacgtccgaaaat

SEQ ID NO: 4835 - DNA, 20 bp, Artificial Sequence
  Description of Artificial Sequence: Synthetic oligonucleotide
gcgatccgaatttcttccta

SEQ ID NO: 4836 - DNA, 20 bp, Artificial Sequence
  Description of Artificial Sequence: Synthetic oligonucleotide
tacgttcgtttattcgcgtt

SEQ ID NO: 4837 - DNA, 19 bp, Artificial Sequence
  Description of Artificial Sequence: Synthetic oligonucleotide
ccgcgaacacgtctactaa

SEQ ID NO: 4838 - DNA, 20 bp, Artificial Sequence
  Description of Artificial Sequence: Synthetic oligonucleotide
gaatttcttcctaaccgcga

SEQ ID NO: 4839 - DNA, 21 bp, Artificial Sequence
  Description of Artificial Sequence: Synthetic oligonucleotide
agttagtagacgtgttcgcgg

SEQ ID NO: 4840 - DNA, 21 bp, Artificial Sequence
  Description of Artificial Sequence: Synthetic oligonucleotide
gattcgtcgatttttgtcgag

SEQ ID NO: 4841 - DNA, 19 bp, Artificial Sequence
  Description of Artificial Sequence: Synthetic oligonucleotide
tacgcgatccgaatttctt

SEQ ID NO: 4842 - DNA, 22 bp, Artificial Sequence
  Description of Artificial Sequence: Synthetic oligonucleotide
gaatttcttcctaaccgcgata

SEQ ID NO: 4843 - DNA, 23 bp, Artificial Sequence
  Description of Artificial Sequence: Synthetic oligonucleotide
aaacctataactacgtccgaaaa

SEQ ID NO: 4844 - DNA, 21 bp, Artificial Sequence
  Description of Artificial Sequence: Synthetic oligonucleotide
tcgacgataaaacctacgaat

SEQ ID NO: 4845 - DNA, 22 bp, Artificial Sequence
  Description of Artificial Sequence: Synthetic oligonucleotide
tagttagtagacgtgttcgcgg

SEQ ID NO: 4846 - DNA, 23 bp, Artificial Sequence
  Description of Artificial Sequence: Synthetic oligonucleotide
attaggcgtattagttagttcgg

SEQ ID NO: 4847 - DNA, 21 bp, Artificial Sequence
  Description of Artificial Sequence: Synthetic oligonucleotide
gctaaacacctaacgaaacga

SEQ ID NO: 4848 - DNA, 21 bp, Artificial Sequence
  Description of Artificial Sequence: Synthetic oligonucleotide
cggatcgcgtatagttatttt

SEQ ID NO: 4849 - DNA, 21 bp, Artificial Sequence
  Description of Artificial Sequence: Synthetic oligonucleotide
ctccgaatctaaacaaaaacg

SEQ ID NO: 4850 - DNA, 22 bp, Artificial Sequence
  Description of Artificial Sequence: Synthetic oligonucleotide
actctcgatacaaaccgctaaa

SEQ ID NO: 4851 - DNA, 19 bp, Artificial Sequence
  Description of Artificial Sequence: Synthetic oligonucleotide
ggattattcggaggattcg

SEQ ID NO: 4852 - DNA, 22 bp, Artificial Sequence
  Description of Artificial Sequence: Synthetic oligonucleotide
ctctcgatacaaaccgctaaac

SEQ ID NO: 4853 - DNA, 22 bp, Artificial Sequence
  Description of Artificial Sequence: Synthetic oligonucleotide
aactctcgatacaaaccgctaa

SEQ ID NO: 4854 - DNA, 21 bp, Artificial Sequence
  Description of Artificial Sequence: Synthetic oligonucleotide
cgtttttgtttagattcggag

SEQ ID NO: 4855 - DNA, 20 bp, Artificial Sequence
  Description of Artificial Sequence: Synthetic oligonucleotide
tattcgcgtttgagtagcgt

SEQ ID NO: 4856 - DNA, 25 bp, Artificial Sequence
  Description of Artificial Sequence: Synthetic oligonucleotide
aggttatatttgataatttcgtcgg

SEQ ID NO: 4857 - DNA, 24 bp, Artificial Sequence
  Description of Artificial Sequence: Synthetic oligonucleotide
ttatatttgataatttcgtcggat

SEQ ID NO: 4858 - DNA, 21 bp, Artificial Sequence
  Description of Artificial Sequence: Synthetic oligonucleotide
ttacgttcgtttattcgcgtt

SEQ ID NO: 4859 - DNA, 19 bp, Artificial Sequence
  Description of Artificial Sequence: Synthetic oligonucleotide
aatttcttcctaaccgcga

SEQ ID NO: 4860 - DNA, 19 bp, Artificial Sequence
  Description of Artificial Sequence: Synthetic oligonucleotide
cgaatttcttcctaaccgc

SEQ ID NO: 4861 - DNA, 21 bp, Artificial Sequence
  Description of Artificial Sequence: Synthetic oligonucleotide
ccgctaaacacctaacgaaac

SEQ ID NO: 4862 - DNA, 18 bp, Artificial Sequence
  Description of Artificial Sequence: Synthetic oligonucleotide
ttgtcgagtcggtggttc

SEQ ID NO: 4863 - DNA, 29 bp, Artificial Sequence
  Description of Artificial Sequence: Synthetic oligonucleotide
atcgcgttatagaattcgaggcgttcggg

SEQ ID NO: 4864 - DNA, 20 bp, Artificial Sequence
  Description of Artificial Sequence: Synthetic oligonucleotide
ttacgttcgtttattcgcgt

SEQ ID NO: 4865 - DNA, 19 bp, Artificial Sequence
  Description of Artificial Sequence: Synthetic oligonucleotide
gaccgcgaacacgtctact

SEQ ID NO: 4866 - DNA, 33 bp, Artificial Sequence
  Description of Artificial Sequence: Synthetic oligonucleotide
gtttgagtagcgtttttaattagcggcgttagt

SEQ ID NO: 4867 - DNA, 23 bp, Artificial Sequence
  Description of Artificial Sequence: Synthetic oligonucleotide
aaaacctataactacgtccgaaa

SEQ ID NO: 4868 - DNA, 21 bp, Artificial Sequence
  Description of Artificial Sequence: Synthetic oligonucleotide
ttcttcctaaccgcgataaaa

SEQ ID NO: 4869 - DNA, 21 bp, Artificial Sequence
  Description of Artificial Sequence: Synthetic oligonucleotide
tcttcctaaccgcgataaaaa

SEQ ID NO: 4870 - DNA, 21 bp, Artificial Sequence
  Description of Artificial Sequence: Synthetic oligonucleotide
tttcttcctaaccgcgataaa

SEQ ID NO: 4871 - DNA, 21 bp, Artificial Sequence
  Description of Artificial Sequence: Synthetic oligonucleotide
gttcgtttattcgcgtttgag

SEQ ID NO: 4872 - DNA, 20 bp, Artificial Sequence
  Description of Artificial Sequence: Synthetic oligonucleotide
ttaggaagaaattcggatcg

SEQ ID NO: 4873 - DNA, 20 bp, Artificial Sequence
  Description of Artificial Sequence: Synthetic oligonucleotide
cgtctacaacccctacgact

SEQ ID NO: 4874 - DNA, 19 bp, Artificial Sequence
  Description of Artificial Sequence: Synthetic oligonucleotide
agttagttcggcggttttg

SEQ ID NO: 4875 - DNA, 23 bp, Artificial Sequence
  Description of Artificial Sequence: Synthetic oligonucleotide
ttttcgtttttgtttagattcgg

SEQ ID NO: 4876 - DNA, 19 bp, Artificial Sequence
  Description of Artificial Sequence: Synthetic oligonucleotide
ccgaatttcttcctaaccg

SEQ ID NO: 4877 - DNA, 21 bp, Artificial Sequence
  Description of Artificial Sequence: Synthetic oligonucleotide
aactctcgatacaaaccgcta

SEQ ID NO: 4878 - DNA, 21 bp, Artificial Sequence
  Description of Artificial Sequence: Synthetic oligonucleotide
caaaccgctaaacacctaacg

SEQ ID NO: 4879 - DNA, 21 bp, Artificial Sequence
  Description of Artificial Sequence: Synthetic oligonucleotide
aaatcgtaactaaactccccg

SEQ ID NO: 4880 - DNA, 33 bp, Artificial Sequence
  Description of Artificial Sequence: Synthetic oligonucleotide
atttcgagttgggatagcggttgttttttgaaa

SEQ ID NO: 4881 - DNA, 25 bp, Artificial Sequence
  Description of Artificial Sequence: Synthetic oligonucleotide
gttatatttgataatttcgtcggat

SEQ ID NO: 4882 - DNA, 21 bp, Artificial Sequence
  Description of Artificial Sequence: Synthetic oligonucleotide
tcggatcgcgtatagttattt

SEQ ID NO: 4883 - DNA, 24 bp, Artificial Sequence
  Description of Artificial Sequence: Synthetic oligonucleotide
tatcaaaacctataactacgtccg

SEQ ID NO: 4884 - DNA, 21 bp, Artificial Sequence
  Description of Artificial Sequence: Synthetic oligonucleotide
ttattcgcgtttgagtagcgt

SEQ ID NO: 4885 - DNA, 24 bp, Artificial Sequence
  Description of Artificial Sequence: Synthetic oligonucleotide
caaaacctataactacgtccgaaa

SEQ ID NO: 4886 - DNA, 20 bp, Artificial Sequence
  Description of Artificial Sequence: Synthetic oligonucleotide
taggaagaaattcggatcgc

SEQ ID NO: 4887 - DNA, 19 bp, Artificial Sequence
  Description of Artificial Sequence: Synthetic oligonucleotide
ttgttgggaaacgtagtcg

SEQ ID NO: 4888 - DNA, 33 bp, Artificial Sequence
  Description of Artificial Sequence: Synthetic oligonucleotide
ttcgagttgggatagcggttgttttttgaaaag

SEQ ID NO: 4889 - DNA, 25 bp, Artificial Sequence
  Description of Artificial Sequence: Synthetic oligonucleotide
ctatcaaaacctataactacgtccg

SEQ ID NO: 4890 - DNA, 21 bp, Artificial Sequence
  Description of Artificial Sequence: Synthetic oligonucleotide
tttacgttcgtttattcgcgt

SEQ ID NO: 4891 - DNA, 19 bp, Artificial Sequence
  Description of Artificial Sequence: Synthetic oligonucleotide
accgtctacaacccctacg

SEQ ID NO: 4892 - DNA, 20 bp, Artificial Sequence
  Description of Artificial Sequence: Synthetic oligonucleotide
cgtaactaaactccccgacc

SEQ ID NO: 4893 - DNA, 21 bp, Artificial Sequence
  Description of Artificial Sequence: Synthetic oligonucleotide
gttgggaaacgtagtcgtgat

SEQ ID NO: 4894 - DNA, 21 bp, Artificial Sequence
  Description of Artificial Sequence: Synthetic oligonucleotide
cgatacaaaccgctaaacacc

SEQ ID NO: 4895 - DNA, 20 bp, Artificial Sequence
  Description of Artificial Sequence: Synthetic oligonucleotide
ccgtctacaacccctacgac

SEQ ID NO: 4896 - DNA, 18 bp, Artificial Sequence
  Description of Artificial Sequence: Synthetic oligonucleotide
tttgtcgagtcggtggtt

SEQ ID NO: 4897 - DNA, 20 bp, Artificial Sequence
  Description of Artificial Sequence: Synthetic oligonucleotide
cgcgaacacgtctactaact

SEQ ID NO: 4898 - DNA, 20 bp, Artificial Sequence
  Description of Artificial Sequence: Synthetic oligonucleotide
aaaccgctaaacacctaacg

SEQ ID NO: 4899 - DNA, 20 bp, Artificial Sequence
  Description of Artificial Sequence: Synthetic oligonucleotide
tatcgcggttaggaagaaat

SEQ ID NO: 4900 - DNA, 20 bp, Artificial Sequence
  Description of Artificial Sequence: Synthetic oligonucleotide
atttttgtcgagtcggtggt

SEQ ID NO: 4901 - DNA, 19 bp, Artificial Sequence
  Description of Artificial Sequence: Synthetic oligonucleotide
tcgtcgatttttgtcgagt

SEQ ID NO: 4902 - DNA, 19 bp, Artificial Sequence
  Description of Artificial Sequence: Synthetic oligonucleotide
tttgtcgagtcggtggttc

SEQ ID NO: 4903 - DNA, 25 bp, Artificial Sequence
  Description of Artificial Sequence: Synthetic oligonucleotide
gatctaaaataactatacgcgatcc

SEQ ID NO: 4904 - DNA, 19 bp, Artificial Sequence
  Description of Artificial Sequence: Synthetic oligonucleotide
tcggcggttttggttatag

SEQ ID NO: 4905 - DNA, 20 bp, Artificial Sequence
  Description of Artificial Sequence: Synthetic oligonucleotide
cgtttattcgcgtttgagta

SEQ ID NO: 4906 - DNA, 18 bp, Artificial Sequence
  Description of Artificial Sequence: Synthetic oligonucleotide
acgcgatccgaatttctt

SEQ ID NO: 4907 - DNA, 22 bp, Artificial Sequence
  Description of Artificial Sequence: Synthetic oligonucleotide
attcggagtttaagtcgttgtt

SEQ ID NO: 4908 - DNA, 19 bp, Artificial Sequence
  Description of Artificial Sequence: Synthetic oligonucleotide
cggttaggaagaaattcgg

SEQ ID NO: 4909 - DNA, 21 bp, Artificial Sequence
  Description of Artificial Sequence: Synthetic oligonucleotide
gattcggagtttaagtcgttg

SEQ ID NO: 4910 - DNA, 19 bp, Artificial Sequence
  Description of Artificial Sequence: Synthetic oligonucleotide
cgatttttgtcgagtcggt

SEQ ID NO: 4911 - DNA, 20 bp, Artificial Sequence
  Description of Artificial Sequence: Synthetic oligonucleotide
ttcttcctaaccgcgataaa

SEQ ID NO: 4912 - DNA, 23 bp, Artificial Sequence
  Description of Artificial Sequence: Synthetic oligonucleotide
tcgacgataaaacctacgaataa

SEQ ID NO: 4913 - DNA, 19 bp, Artificial Sequence
  Description of Artificial Sequence: Synthetic oligonucleotide
agtagacgtgttcgcggtc

SEQ ID NO: 4914 - DNA, 29 bp, Artificial Sequence
  Description of Artificial Sequence: Synthetic oligonucleotide
tttcgggttggggttcgtattcggataga

SEQ ID NO: 4915 - DNA, 18 bp, Artificial Sequence
  Description of Artificial Sequence: Synthetic oligonucleotide
agtcggtggttcgggata

SEQ ID NO: 4916 - DNA, 26 bp, Artificial Sequence
  Description of Artificial Sequence: Synthetic oligonucleotide
aattcgaggcgttcgggcgttttcgt

SEQ ID NO: 4917 - DNA, 20 bp, Artificial Sequence
  Description of Artificial Sequence: Synthetic oligonucleotide
gttagtagacgtgttcgcgg

SEQ ID NO: 4918 - DNA, 21 bp, Artificial Sequence
  Description of Artificial Sequence: Synthetic oligonucleotide
cgctaaacacctaacgaaacg

SEQ ID NO: 4919 - DNA, 18 bp, Artificial Sequence
  Description of Artificial Sequence: Synthetic oligonucleotide
cgaatacgaaccccaacc

SEQ ID NO: 4920 - DNA, 18 bp, Artificial Sequence
  Description of Artificial Sequence: Synthetic oligonucleotide
ccgaatacgaaccccaac

SEQ ID NO: 4921 - DNA, 19 bp, Artificial Sequence
  Description of Artificial Sequence: Synthetic oligonucleotide
attcgcgtttgagtagcgt

SEQ ID NO: 4922 - DNA, 20 bp, Artificial Sequence
  Description of Artificial Sequence: Synthetic oligonucleotide
ttcggcggttttggttatag

SEQ ID NO: 4923 - DNA, 26 bp, Artificial Sequence
  Description of Artificial Sequence: Synthetic oligonucleotide
taggttatatttgataatttcgtcgg

SEQ ID NO: 4924 - DNA, 22 bp, Artificial Sequence
  Description of Artificial Sequence: Synthetic oligonucleotide
accgctaaacacctaacgaaac

SEQ ID NO: 4925 - DNA, 19 bp, Artificial Sequence
  Description of Artificial Sequence: Synthetic oligonucleotide
atttttgtcgagtcggtgg

SEQ ID NO: 4926 - DNA, 25 bp, Artificial Sequence
  Description of Artificial Sequence: Synthetic oligonucleotide
tcgcgtatagttattttagatcgag

SEQ ID NO: 4927 - DNA, 21 bp, Artificial Sequence
  Description of Artificial Sequence: Synthetic oligonucleotide
ccgaatctaaacaaaaacgaa

SEQ ID NO: 4928 - DNA, 20 bp, Artificial Sequence
  Description of Artificial Sequence: Synthetic oligonucleotide
agtcgtaggggttgtagacg

SEQ ID NO: 4929 - DNA, 19 bp, Artificial Sequence
  Description of Artificial Sequence: Synthetic oligonucleotide
ctaactacgcgacccgaac

SEQ ID NO: 4930 - DNA, 21 bp, Artificial Sequence
  Description of Artificial Sequence: Synthetic oligonucleotide
tcgttaggtgtttagcggttt

SEQ ID NO: 4931 - DNA, 30 bp, Artificial Sequence
  Description of Artificial Sequence: Synthetic oligonucleotide
ttcgatttttcgaggcgcgggagtttacgg

SEQ ID NO: 4932 - DNA, 23 bp, Artificial Sequence
  Description of Artificial Sequence: Synthetic oligonucleotide
ctaactctcgatacaaaccgcta

SEQ ID NO: 4933 - DNA, 29 bp, Artificial Sequence
  Description of Artificial Sequence: Synthetic oligonucleotide
gttatagaattcgaggcgttcgggcgttt

SEQ ID NO: 4934 - DNA, 20 bp, Artificial Sequence
  Description of Artificial Sequence: Synthetic oligonucleotide
cttcctaaccgcgataaaaa

SEQ ID NO: 4935 - DNA, 24 bp, Artificial Sequence
  Description of Artificial Sequence: Synthetic oligonucleotide
cgcgtatagttattttagatcgag

SEQ ID NO: 4936 - DNA, 20 bp, Artificial Sequence
  Description of Artificial Sequence: Synthetic oligonucleotide
tgttgggaaacgtagtcgtg

SEQ ID NO: 4937 - DNA, 18 bp, Artificial Sequence
  Description of Artificial Sequence: Synthetic oligonucleotide
gtagacgtgttcgcggtc

SEQ ID NO: 4938 - DNA, 19 bp, Artificial Sequence
  Description of Artificial Sequence: Synthetic oligonucleotide
tttttgtcgagtcggtggt

SEQ ID NO: 4939 - DNA, 38 bp, Artificial Sequence
  Description of Artificial Sequence: Synthetic oligonucleotide
aaattcggatcgcgtatagttattttagatcgagtagt

SEQ ID NO: 4940 - DNA, 18 bp, Artificial Sequence
  Description of Artificial Sequence: Synthetic oligonucleotide
ggaagaaattcggatcgc

SEQ ID NO: 4941 - DNA, 21 bp, Artificial Sequence
  Description of Artificial Sequence: Synthetic oligonucleotide
aaccgctaaacacctaacgaa

SEQ ID NO: 4942 - DNA, 24 bp, Artificial Sequence
  Description of Artificial Sequence: Synthetic oligonucleotide
atctaaaataactatacgcgatcc

SEQ ID NO: 4943 - DNA, 17 bp, Artificial Sequence
  Description of Artificial Sequence: Synthetic oligonucleotide
gtcggtggttcgggata

SEQ ID NO: 4944 - DNA, 19 bp, Artificial Sequence
  Description of Artificial Sequence: Synthetic oligonucleotide
aggaagaaattcggatcgc

SEQ ID NO: 4945 - DNA, 18 bp, Artificial Sequence
  Description of Artificial Sequence: Synthetic oligonucleotide
ccacctaactacgcgacc

SEQ ID NO: 4946 - DNA, 22 bp, Artificial Sequence
  Description of Artificial Sequence: Synthetic oligonucleotide
tttagcggtttgtatcgagagt

SEQ ID NO: 4947 - DNA, 22 bp, Artificial Sequence
  Description of Artificial Sequence: Synthetic oligonucleotide
gtttagcggtttgtatcgagag

SEQ ID NO: 4948 - DNA, 18 bp, Artificial Sequence
  Description of Artificial Sequence: Synthetic oligonucleotide
cacctaactacgcgaccc

SEQ ID NO: 4949 - DNA, 18 bp, Artificial Sequence
  Description of Artificial Sequence: Synthetic oligonucleotide
cccacctaactacgcgac

SEQ ID NO: 4950 - DNA, 26 bp, Artificial Sequence
  Description of Artificial Sequence: Synthetic oligonucleotide
actatcaaaacctataactacgtccg

SEQ ID NO: 4951 - DNA, 18 bp, Artificial Sequence
  Description of Artificial Sequence: Synthetic oligonucleotide
aagaaattcggatcgcgt

SEQ ID NO: 4952 - DNA, 20 bp, Artificial Sequence
  Description of Artificial Sequence: Synthetic oligonucleotide
tagtagacgtgttcgcggtc

SEQ ID NO: 4953 - DNA, 22 bp, Artificial Sequence
  Description of Artificial Sequence: Synthetic oligonucleotide
taatcatacgaaacgcataccc

SEQ ID NO: 4954 - DNA, 20 bp, Artificial Sequence
  Description of Artificial Sequence: Synthetic oligonucleotide
gtcgtttagggagaaggtcg

SEQ ID NO: 4955 - DNA, 36 bp, Artificial Sequence
  Description of Artificial Sequence: Synthetic oligonucleotide
gggcgtcgagttttttgttatagtttaggcggaatt

SEQ ID NO: 4956 - DNA, 19 bp, Artificial Sequence
  Description of Artificial Sequence: Synthetic oligonucleotide
tcgtttagggagaaggtcg

SEQ ID NO: 4957 - DNA, 23 bp, Artificial Sequence
  Description of Artificial Sequence: Synthetic oligonucleotide
cggttttcgttaatttagtgttg

SEQ ID NO: 4958 - DNA, 22 bp, Artificial Sequence
  Description of Artificial Sequence: Synthetic oligonucleotide
taaaacgccgataaacttcttt

SEQ ID NO: 4959 - DNA, 30 bp, Artificial Sequence
  Description of Artificial Sequence: Synthetic oligonucleotide
gtgggcgagattttagcgtatagttgaggg

SEQ ID NO: 4960 - DNA, 22 bp, Artificial Sequence
  Description of Artificial Sequence: Synthetic oligonucleotide
tatgtttattacggtgaaggcg

SEQ ID NO: 4961 - DNA, 23 bp, Artificial Sequence
  Description of Artificial Sequence: Synthetic oligonucleotide
caacactaaattaacgaaaaccg

SEQ ID NO: 4962 - DNA, 37 bp, Artificial Sequence
  Description of Artificial Sequence: Synthetic oligonucleotide
ttcgggattaatatcgagatggatattttgttggtgt

SEQ ID NO: 4963 - DNA, 23 bp, Artificial Sequence
  Description of Artificial Sequence: Synthetic oligonucleotide
cgtatagttgagggtagatttcg

SEQ ID NO: 4964 - DNA, 22 bp, Artificial Sequence
  Description of Artificial Sequence: Synthetic oligonucleotide
taaacaaaacgcttaaattccg

SEQ ID NO: 4965 - DNA, 49 bp, Artificial Sequence
  Description of Artificial Sequence: Synthetic oligonucleotide
gagtatgaaattttttttaaagaagtttatcggcgttttatatttgagg

SEQ ID NO: 4966 - DNA, 23 bp, Artificial Sequence
  Description of Artificial Sequence: Synthetic oligonucleotide
ataaaacgccgataaacttcttt

SEQ ID NO: 4967 - DNA, 22 bp, Artificial Sequence
  Description of Artificial Sequence: Synthetic oligonucleotide
tcggttttcgttaatttagtgt

SEQ ID NO: 4968 - DNA, 22 bp, Artificial Sequence
  Description of Artificial Sequence: Synthetic oligonucleotide
cctcaaatataaaacgccgata

SEQ ID NO: 4969 - DNA, 23 bp, Artificial Sequence
  Description of Artificial Sequence: Synthetic oligonucleotide
cactaaattaacgaaaaccgaaa

SEQ ID NO: 4970 - DNA, 23 bp, Artificial Sequence
  Description of Artificial Sequence: Synthetic oligonucleotide
tcggttttcgttaatttagtgtt

SEQ ID NO: 4971 - DNA, 23 bp, Artificial Sequence
  Description of Artificial Sequence: Synthetic oligonucleotide
ttcggttttcgttaatttagtgt

SEQ ID NO: 4972 - DNA, 24 bp, Artificial Sequence
  Description of Artificial Sequence: Synthetic oligonucleotide
cggttttcgttaatttagtgttgt

SEQ ID NO: 4973 - DNA, 21 bp, Artificial Sequence
  Description of Artificial Sequence: Synthetic oligonucleotide
aaaacgccgataaacttcttt

SEQ ID NO: 4974 - DNA, 23 bp, Artificial Sequence
  Description of Artificial Sequence: Synthetic oligonucleotide
acactaaattaacgaaaaccgaa

SEQ ID NO: 4975 - DNA, 23 bp, Artificial Sequence
  Description of Artificial Sequence: Synthetic oligonucleotide
aacactaaattaacgaaaaccga

SEQ ID NO: 4976 - DNA, 24 bp, Artificial Sequence
  Description of Artificial Sequence: Synthetic oligonucleotide
tttcggttttcgttaatttagtgt

SEQ ID NO: 4977 - DNA, 21 bp, Artificial Sequence
  Description of Artificial Sequence: Synthetic oligonucleotide
atgtttattacggtgaaggcg

SEQ ID NO: 4978 - DNA, 23 bp, Artificial Sequence
  Description of Artificial Sequence: Synthetic oligonucleotide
ctaaattaacgaaaaccgaaacg

SEQ ID NO: 4979 - DNA, 21 bp, Artificial Sequence
  Description of Artificial Sequence: Synthetic oligonucleotide
aaacaaaacgcttaaattccg

SEQ ID NO: 4980 - DNA, 22 bp, Artificial Sequence
  Description of Artificial Sequence: Synthetic oligonucleotide
acgacctcaaatataaaacgcc

SEQ ID NO: 4981 - DNA, 24 bp, Artificial Sequence
  Description of Artificial Sequence: Synthetic oligonucleotide
tataaaacgccgataaacttcttt

SEQ ID NO: 4982 - DNA, 21 bp, Artificial Sequence
  Description of Artificial Sequence: Synthetic oligonucleotide
cgacctcaaatataaaacgcc

SEQ ID NO: 4983 - DNA, 23 bp, Artificial Sequence
  Description of Artificial Sequence: Synthetic oligonucleotide
ataaacaaaacgcttaaattccg

SEQ ID NO: 4984 - DNA, 24 bp, Artificial Sequence
  Description of Artificial Sequence: Synthetic oligonucleotide
acaacactaaattaacgaaaaccg

SEQ ID NO: 4985 - DNA, 24 bp, Artificial Sequence
  Description of Artificial Sequence: Synthetic oligonucleotide
ttcggttttcgttaatttagtgtt

SEQ ID NO: 4986 - DNA, 23 bp, Artificial Sequence
  Description of Artificial Sequence: Synthetic oligonucleotide
gtttcggttttcgttaatttagt

SEQ ID NO: 4987 - DNA, 20 bp, Artificial Sequence
  Description of Artificial Sequence: Synthetic oligonucleotide
tgtttattacggtgaaggcg

SEQ ID NO: 4988 - DNA, 24 bp, Artificial Sequence
  Description of Artificial Sequence: Synthetic oligonucleotide
aaatataaaacgccgataaacttc

SEQ ID NO: 4989 - DNA, 23 bp, Artificial Sequence
  Description of Artificial Sequence: Synthetic oligonucleotide
gtatgtttattacggtgaaggcg

SEQ ID NO: 4990 - DNA, 22 bp, Artificial Sequence
  Description of Artificial Sequence: Synthetic oligonucleotide
actaaattaacgaaaaccgaaa

SEQ ID NO: 4991 - DNA, 22 bp, Artificial Sequence
  Description of Artificial Sequence: Synthetic oligonucleotide
cggttttcgttaatttagtgtt

SEQ ID NO: 4992 - DNA, 20 bp, Artificial Sequence
  Description of Artificial Sequence: Synthetic oligonucleotide
cggaggagttggtatttcgt

SEQ ID NO: 4993 - DNA, 22 bp, Artificial Sequence
  Description of Artificial Sequence: Synthetic oligonucleotide
cgccttcaccgtaataaacata

SEQ ID NO: 4994 - DNA, 37 bp, Artificial Sequence
  Description of Artificial Sequence: Synthetic oligonucleotide
tttggatcgttttcggttttttaggataaatacgagt

SEQ ID NO: 4995 - DNA, 25 bp, Artificial Sequence
  Description of Artificial Sequence: Synthetic oligonucleotide
aatataaaacgccgataaacttctt

SEQ ID NO: 4996 - DNA, 25 bp, Artificial Sequence
  Description of Artificial Sequence: Synthetic oligonucleotide
atataaaacgccgataaacttcttt

SEQ ID NO: 4997 - DNA, 24 bp, Artificial Sequence
  Description of Artificial Sequence: Synthetic oligonucleotide
cgagtatgtttattacggtgaagg

SEQ ID NO: 4998 - DNA, 21 bp, Artificial Sequence
  Description of Artificial Sequence: Synthetic oligonucleotide
acctcaaatataaaacgccga

SEQ ID NO: 4999 - DNA, 19 bp, Artificial Sequence
  Description of Artificial Sequence: Synthetic oligonucleotide
atgtcgtttttagtcgcgg

SEQ ID NO: 5000 - DNA, 22 bp, Artificial Sequence
  Description of Artificial Sequence: Synthetic oligonucleotide
cgcaaaaataaacaattacacg

SEQ ID NO: 5001 - DNA, 38 bp, Artificial Sequence
  Description of Artificial Sequence: Synthetic oligonucleotide
ggcgggtagagtttttggagcgcgtggattttatgcga

SEQ ID NO: 5002 - DNA, 22 bp, Artificial Sequence
  Description of Artificial Sequence: Synthetic oligonucleotide
tttcggttttcgttaatttagt

SEQ ID NO: 5003 - DNA, 24 bp, Artificial Sequence
  Description of Artificial Sequence: Synthetic oligonucleotide
acgagtatgtttattacggtgaag

SEQ ID NO: 5004 - DNA, 20 bp, Artificial Sequence
  Description of Artificial Sequence: Synthetic oligonucleotide
taacgtgggcgagattttag

SEQ ID NO: 5005 - DNA, 24 bp, Artificial Sequence
  Description of Artificial Sequence: Synthetic oligonucleotide
ttccgaaatactaataaacgacct

SEQ ID NO: 5006 - DNA, 20 bp, Artificial Sequence
  Description of Artificial Sequence: Synthetic oligonucleotide
atataaaaccgcgacatcca

SEQ ID NO: 5007 - DNA, 22 bp, Artificial Sequence
  Description of Artificial Sequence: Synthetic oligonucleotide
ggagagcgtagttagttcgttt

SEQ ID NO: 5008 - DNA, 49 bp, Artificial Sequence
  Description of Artificial Sequence: Synthetic oligonucleotide
agtacgattttgttggaagaattgatagtgttttcgttttcggtttcgg

SEQ ID NO: 5009 - DNA, 21 bp, Artificial Sequence
  Description of Artificial Sequence: Synthetic oligonucleotide
gggagagcgtagttagttcgt

SEQ ID NO: 5010 - DNA, 23 bp, Artificial Sequence
  Description of Artificial Sequence: Synthetic oligonucleotide
ttaacatctcgtctcttaaaccg

SEQ ID NO: 5011 - DNA, 20 bp, Artificial Sequence
  Description of Artificial Sequence: Synthetic oligonucleotide
ttatttcggtgttggtttcg

SEQ ID NO: 5012 - DNA, 33 bp, Artificial Sequence
  Description of Artificial Sequence: Synthetic oligonucleotide
atcgtggtgggtatgttcgtgtttattttgagg

SEQ ID NO: 5013 - DNA, 21 bp, Artificial Sequence
  Description of Artificial Sequence: Synthetic oligonucleotide
tataaaaccgcgacatccaac

SEQ ID NO: 5014 - DNA, 22 bp, Artificial Sequence
  Description of Artificial Sequence: Synthetic oligonucleotide
acatctcgtctcttaaaccgct

SEQ ID NO: 5015 - DNA, 21 bp, Artificial Sequence
  Description of Artificial Sequence: Synthetic oligonucleotide
catctcgtctcttaaaccgct

SEQ ID NO: 5016 - DNA, 21 bp, Artificial Sequence
  Description of Artificial Sequence: Synthetic oligonucleotide
tttatttcggtgttggtttcg

SEQ ID NO: 5017 - DNA, 22 bp, Artificial Sequence
  Description of Artificial Sequence: Synthetic oligonucleotide
taacatctcgtctcttaaaccg

SEQ ID NO: 5018 - DNA, 22 bp, Artificial Sequence
  Description of Artificial Sequence: Synthetic oligonucleotide
aacatctcgtctcttaaaccgc

SEQ ID NO: 5019 - DNA, 20 bp, Artificial Sequence
  Description of Artificial Sequence: Synthetic oligonucleotide
tataaaaccgcgacatccaa

SEQ ID NO: 5020 - DNA, 24 bp, Artificial Sequence
  Description of Artificial Sequence: Synthetic oligonucleotide
attaacatctcgtctcttaaaccg

SEQ ID NO: 5021 - DNA, 22 bp, Artificial Sequence
  Description of Artificial Sequence: Synthetic oligonucleotide
taacgtaaacgaaatcctaacg

SEQ ID NO: 5022 - DNA, 20 bp, Artificial Sequence
  Description of Artificial Sequence: Synthetic oligonucleotide
cgaagtgttgatgagcgatt

SEQ ID NO: 5023 - DNA, 34 bp, Artificial Sequence
  Description of Artificial Sequence: Synthetic oligonucleotide
agtgtgagacgtcggtgaatttttttagaaagga

SEQ ID NO: 5024 - DNA, 20 bp, Artificial Sequence
  Description of Artificial Sequence: Synthetic oligonucleotide
ataaaaccgcgacatccaac

SEQ ID NO: 5025 - DNA, 21 bp, Artificial Sequence
  Description of Artificial Sequence: Synthetic oligonucleotide
atataaaaccgcgacatccaa

SEQ ID NO: 5026 - DNA, 23 bp, Artificial Sequence
  Description of Artificial Sequence: Synthetic oligonucleotide
gagagcgtagttagttcgttttt

SEQ ID NO: 5027 - DNA, 22 bp, Artificial Sequence
  Description of Artificial Sequence: Synthetic oligonucleotide
acgtaaacgaaatcctaacgta

SEQ ID NO: 5028 - DNA, 20 bp, Artificial Sequence
  Description of Artificial Sequence: Synthetic oligonucleotide
tcgaagtgttgatgagcgat

SEQ ID NO: 5029 - DNA, 34 bp, Artificial Sequence
  Description of Artificial Sequence: Synthetic oligonucleotide
aagtgtgagacgtcggtgaatttttttagaaagg

SEQ ID NO: 5030 - DNA, 19 bp, Artificial Sequence
  Description of Artificial Sequence: Synthetic oligonucleotide
tatttcggtgttggtttcg

SEQ ID NO: 5031 - DNA, 23 bp, Artificial Sequence
  Description of Artificial Sequence: Synthetic oligonucleotide
aacgtaaacgaaatcctaacgta

SEQ ID NO: 5032 - DNA, 19 bp, Artificial Sequence
  Description of Artificial Sequence: Synthetic oligonucleotide
ataaaaccgcgacatccaa

SEQ ID NO: 5033 - DNA, 22 bp, Artificial Sequence
  Description of Artificial Sequence: Synthetic oligonucleotide
aaaaattaaaatacgtcccgat

SEQ ID NO: 5034 - DNA, 25 bp, Artificial Sequence
  Description of Artificial Sequence: Synthetic oligonucleotide
tttagttgtacgttaggatttcgtt

SEQ ID NO: 5035 - DNA, 42 bp, Artificial Sequence
  Description of Artificial Sequence: Synthetic oligonucleotide
tacgttaatttcgtatagtaaaaatagtattgggttggcgga

SEQ ID NO: 5036 - DNA, 25 bp, Artificial Sequence
  Description of Artificial Sequence: Synthetic oligonucleotide
ttagttgtacgttaggatttcgttt

SEQ ID NO: 5037 - DNA, 23 bp, Artificial Sequence
  Description of Artificial Sequence: Synthetic oligonucleotide
cgtaaacgaaatcctaacgtaca

SEQ ID NO: 5038 - DNA, 19 bp, Artificial Sequence
  Description of Artificial Sequence: Synthetic oligonucleotide
tcgaagtgttgatgagcga

SEQ ID NO: 5039 - DNA, 24 bp, Artificial Sequence
  Description of Artificial Sequence: Synthetic oligonucleotide
tagttgtacgttaggatttcgttt

SEQ ID NO: 5040 - DNA, 19 bp, Artificial Sequence
  Description of Artificial Sequence: Synthetic oligonucleotide
taaaaccgcgacatccaac

SEQ ID NO: 5041 - DNA, 22 bp, Artificial Sequence
  Description of Artificial Sequence: Synthetic oligonucleotide
taaaaattaaaatacgtcccga

SEQ ID NO: 5042 - DNA, 21 bp, Artificial Sequence
  Description of Artificial Sequence: Synthetic oligonucleotide
aacgtaaacgaaatcctaacg

SEQ ID NO: 5043 - DNA, 18 bp, Artificial Sequence
  Description of Artificial Sequence: Synthetic oligonucleotide
taaaaccgcgacatccaa

SEQ ID NO: 5044 - DNA, 22 bp, Artificial Sequence
  Description of Artificial Sequence: Synthetic oligonucleotide
taagataggattagcgtttcgg

SEQ ID NO: 5045 - DNA, 22 bp, Artificial Sequence
  Description of Artificial Sequence: Synthetic oligonucleotide
acttaaatacaaccgccgactt

SEQ ID NO: 5046 - DNA, 25 bp, Artificial Sequence
  Description of Artificial Sequence: Synthetic oligonucleotide
tgttggtggaaggtcgagtcgggga

SEQ ID NO: 5047 - DNA, 22 bp, Artificial Sequence
  Description of Artificial Sequence: Synthetic oligonucleotide
aagataggattagcgtttcggt

SEQ ID NO: 5048 - DNA, 21 bp, Artificial Sequence
  Description of Artificial Sequence: Synthetic oligonucleotide
cttaaatacaaccgccgactt

SEQ ID NO: 5049 - DNA, 22 bp, Artificial Sequence
  Description of Artificial Sequence: Synthetic oligonucleotide
ataggattagcgtttcggtagg

SEQ ID NO: 5050 - DNA, 22 bp, Artificial Sequence
  Description of Artificial Sequence: Synthetic oligonucleotide
gataggattagcgtttcggtag

SEQ ID NO: 5051 - DNA, 21 bp, Artificial Sequence
  Description of Artificial Sequence: Synthetic oligonucleotide
taaatacaaccgccgacttct

SEQ ID NO: 5052 - DNA, 23 bp, Artificial Sequence
  Description of Artificial Sequence: Synthetic oligonucleotide
agataggattagcgtttcggtag

SEQ ID NO: 5053 - DNA, 21 bp, Artificial Sequence
  Description of Artificial Sequence: Synthetic oligonucleotide
ttaaatacaaccgccgacttc

SEQ ID NO: 5054 - DNA, 21 bp, Artificial Sequence
  Description of Artificial Sequence: Synthetic oligonucleotide
taggattagcgtttcggtagg

SEQ ID NO: 5055 - DNA, 23 bp, Artificial Sequence
  Description of Artificial Sequence: Synthetic oligonucleotide
ttaagataggattagcgtttcgg

SEQ ID NO: 5056 - DNA, 20 bp, Artificial Sequence
  Description of Artificial Sequence: Synthetic oligonucleotide
aaatacaaccgccgacttct

SEQ ID NO: 5057 - DNA, 24 bp, Artificial Sequence
  Description of Artificial Sequence: Synthetic oligonucleotide
tgagacgtttatattgatttttcg

SEQ ID NO: 5058 - DNA, 22 bp, Artificial Sequence
  Description of Artificial Sequence: Synthetic oligonucleotide
cgctaataccgacaccaaatac

SEQ ID NO: 5059 - DNA, 33 bp, Artificial Sequence
  Description of Artificial Sequence: Synthetic oligonucleotide
aagtgttttaggcgggtagtttttgtttcgcgt

SEQ ID NO: 5060 - DNA, 20 bp, Artificial Sequence
  Description of Artificial Sequence: Synthetic oligonucleotide
aggattagcgtttcggtagg

SEQ ID NO: 5061 - DNA, 22 bp, Artificial Sequence
  Description of Artificial Sequence: Synthetic oligonucleotide
cgatcaaacctaaaccacgata

SEQ ID NO: 5062 - DNA, 22 bp, Artificial Sequence
  Description of Artificial Sequence: Synthetic oligonucleotide
aggtacgttaagttaggcgagt

SEQ ID NO: 5063 - DNA, 35 bp, Artificial Sequence
  Description of Artificial Sequence: Synthetic oligonucleotide
ttatttaggtgttgatcgcgtagggattattgagt

SEQ ID NO: 5064 - DNA, 22 bp, Artificial Sequence
  Description of Artificial Sequence: Synthetic oligonucleotide
acgatcaaacctaaaccacgat

SEQ ID NO: 5065 - DNA, 23 bp, Artificial Sequence
  Description of Artificial Sequence: Synthetic oligonucleotide
ggtacgttaagttaggcgagtag

SEQ ID NO: 5066 - DNA, 22 bp, Artificial Sequence
  Description of Artificial Sequence: Synthetic oligonucleotide
tgttagacgtgaatgataacgc

SEQ ID NO: 5067 - DNA, 22 bp, Artificial Sequence
  Description of Artificial Sequence: Synthetic oligonucleotide
atctaaaacgcgcacaatactc

SEQ ID NO: 5068 - DNA, 30 bp, Artificial Sequence
  Description of Artificial Sequence: Synthetic oligonucleotide
aacgatatcgcggagttgtaggtgtcgcgt

SEQ ID NO: 5069 - DNA, 21 bp, Artificial Sequence
  Description of Artificial Sequence: Synthetic oligonucleotide
aacggggttatttacgttttg

SEQ ID NO: 5070 - DNA, 22 bp, Artificial Sequence
  Description of Artificial Sequence: Synthetic oligonucleotide
gcgttatcattcacgtctaaca

SEQ ID NO: 5071 - DNA, 29 bp, Artificial Sequence
  Description of Artificial Sequence: Synthetic oligonucleotide
tttggagagtaacgttacggtgagggtga

SEQ ID NO: 5072 - DNA, 21 bp, Artificial Sequence
  Description of Artificial Sequence: Synthetic oligonucleotide
gccgaaatcgctatctaaaac

SEQ ID NO: 5073 - DNA, 21 bp, Artificial Sequence
  Description of Artificial Sequence: Synthetic oligonucleotide
gggttatttacgttttgcgtt

SEQ ID NO: 5074 - DNA, 21 bp, Artificial Sequence
  Description of Artificial Sequence: Synthetic oligonucleotide
tctaaaacgcgcacaatactc

SEQ ID NO: 5075 - DNA, 22 bp, Artificial Sequence
  Description of Artificial Sequence: Synthetic oligonucleotide
ctatctaaaacgcgcacaatac

SEQ ID NO: 5076 - DNA, 22 bp, Artificial Sequence
  Description of Artificial Sequence: Synthetic oligonucleotide
tatctaaaacgcgcacaatact

SEQ ID NO: 5077 - DNA, 22 bp, Artificial Sequence
  Description of Artificial Sequence: Synthetic oligonucleotide
ggcgacggtattaagtttttag

SEQ ID NO: 5078 - DNA, 22 bp, Artificial Sequence
  Description of Artificial Sequence: Synthetic oligonucleotide
caaaacaatcaacacgaacgta

SEQ ID NO: 5079 - DNA, 38 bp, Artificial Sequence
  Description of Artificial Sequence: Synthetic oligonucleotide
tggttatttagaaggttttggatcgcgagtaatagaat

SEQ ID NO: 5080 - DNA, 22 bp, Artificial Sequence
  Description of Artificial Sequence: Synthetic oligonucleotide
gagtattgtgcgcgttttagat

SEQ ID NO: 5081 - DNA, 21 bp, Artificial Sequence
  Description of Artificial Sequence: Synthetic oligonucleotide
aaataatcgtcgttaccgtcc

SEQ ID NO: 5082 - DNA, 26 bp, Artificial Sequence
  Description of Artificial Sequence: Synthetic oligonucleotide
gatttcggcgagagcgggcgttttat

SEQ ID NO: 5083 - DNA, 22 bp, Artificial Sequence
  Description of Artificial Sequence: Synthetic oligonucleotide
tcgttgggtatagtggttatcg

SEQ ID NO: 5084 - DNA, 22 bp, Artificial Sequence
  Description of Artificial Sequence: Synthetic oligonucleotide
tcacacgaattaaaccgatctt

SEQ ID NO: 5085 - DNA, 33 bp, Artificial Sequence
  Description of Artificial Sequence: Synthetic oligonucleotide
gtttgatcgcgtgcgggagtttttttttatcga

SEQ ID NO: 5086 - DNA, 22 bp, Artificial Sequence
  Description of Artificial Sequence: Synthetic oligonucleotide
ttcacacgaattaaaccgatct

SEQ ID NO: 5087 - DNA, 22 bp, Artificial Sequence
  Description of Artificial Sequence: Synthetic oligonucleotide
cgagaatgggtttcgtatttat

SEQ ID NO: 5088 - DNA, 22 bp, Artificial Sequence
  Description of Artificial Sequence: Synthetic oligonucleotide
ctaaaaacttaataccgtcgcc

SEQ ID NO: 5089 - DNA, 28 bp, Artificial Sequence
  Description of Artificial Sequence: Synthetic oligonucleotide
tacgcgcgacgattacggtttttttgga

SEQ ID NO: 5090 - DNA, 22 bp, Artificial Sequence
  Description of Artificial Sequence: Synthetic oligonucleotide
gctatctaaaacgcgcacaata

SEQ ID NO: 5091 - DNA, 23 bp, Artificial Sequence
  Description of Artificial Sequence: Synthetic oligonucleotide
tcaaacaaataatcgtcgttacc

SEQ ID NO: 5092 - DNA, 32 bp, Artificial Sequence
  Description of Artificial Sequence: Synthetic oligonucleotide
ggcgagagcgggcgttttatttacgagatcgt

SEQ ID NO: 5093 - DNA, 22 bp, Artificial Sequence
  Description of Artificial Sequence: Synthetic oligonucleotide
tgaattttacgaacggggttat

SEQ ID NO: 5094 - DNA, 22 bp, Artificial Sequence
  Description of Artificial Sequence: Synthetic oligonucleotide
gttactctccaaatacgcgaac

SEQ ID NO: 5095 - DNA, 40 bp, Artificial Sequence
  Description of Artificial Sequence: Synthetic oligonucleotide
tacgttttgcgtttttttaatttcgagtagattaaggttt

SEQ ID NO: 5096 - DNA, 22 bp, Artificial Sequence
  Description of Artificial Sequence: Synthetic oligonucleotide
tttcgaggcgttattttatttg

SEQ ID NO: 5097 - DNA, 21 bp, Artificial Sequence
  Description of Artificial Sequence: Synthetic oligonucleotide
acgcgatcaaacacgtaacta

SEQ ID NO: 5098 - DNA, 35 bp, Artificial Sequence
  Description of Artificial Sequence: Synthetic oligonucleotide
ggtatagtggttatcgatttgaacgttatcgacgt

SEQ ID NO: 5099 - DNA, 22 bp, Artificial Sequence
  Description of Artificial Sequence: Synthetic oligonucleotide
gaacggggttatttacgttttg

SEQ ID NO: 5100 - DNA, 21 bp, Artificial Sequence
  Description of Artificial Sequence: Synthetic oligonucleotide
aaatggatatttcggagaacg

SEQ ID NO: 5101 - DNA, 22 bp, Artificial Sequence
  Description of Artificial Sequence: Synthetic oligonucleotide
cgcgtaaacaaataaatacgaa

SEQ ID NO: 5102 - DNA, 49 bp, Artificial Sequence
  Description of Artificial Sequence: Synthetic oligonucleotide
ttcgttttttttttattagcgtatatgatttcgacgtcggcgagaatgg

SEQ ID NO: 5103 - DNA, 21 bp, Artificial Sequence
  Description of Artificial Sequence: Synthetic oligonucleotide
gaattttacgaacggggttat

SEQ ID NO: 5104 - DNA, 22 bp, Artificial Sequence
  Description of Artificial Sequence: Synthetic oligonucleotide
ggttttcgaggcgttattttat

SEQ ID NO: 5105 - DNA, 22 bp, Artificial Sequence
  Description of Artificial Sequence: Synthetic oligonucleotide
cgcgatcaaacacgtaactact

SEQ ID NO: 5106 - DNA, 22 bp, Artificial Sequence
  Description of Artificial Sequence: Synthetic oligonucleotide
cggcgacgtgtttatttatatt

SEQ ID NO: 5107 - DNA, 21 bp, Artificial Sequence
  Description of Artificial Sequence: Synthetic oligonucleotide
ttactctccaaatacgcgaac

SEQ ID NO: 5108 - DNA, 33 bp, Artificial Sequence
  Description of Artificial Sequence: Synthetic oligonucleotide
ttttacgaacggggttatttacgttttgcgttt

SEQ ID NO: 5109 - DNA, 22 bp, Artificial Sequence
  Description of Artificial Sequence: Synthetic oligonucleotide
caaacaaataatcgtcgttacc

SEQ ID NO: 5110 - DNA, 20 bp, Artificial Sequence
  Description of Artificial Sequence: Synthetic oligonucleotide
taaaacgcgcacaatactca

SEQ ID NO: 5111 - DNA, 21 bp, Artificial Sequence
  Description of Artificial Sequence: Synthetic oligonucleotide
tttattattcgttcggtgagc

SEQ ID NO: 5112 - DNA, 22 bp, Artificial Sequence
  Description of Artificial Sequence: Synthetic oligonucleotide
ctcaaaatcacgataaacgaca

SEQ ID NO: 5113 - DNA, 39 bp, Artificial Sequence
  Description of Artificial Sequence: Synthetic oligonucleotide
tacgggtgaatggcgagtagtattattgggatatgtcgt

SEQ ID NO: 5114 - DNA, 21 bp, Artificial Sequence
  Description of Artificial Sequence: Synthetic oligonucleotide
cgaaatcgctatctaaaacgc

SEQ ID NO: 5115 - DNA, 21 bp, Artificial Sequence
  Description of Artificial Sequence: Synthetic oligonucleotide
ctaaaacgcgcacaatactca

SEQ ID NO: 5116 - DNA, 21 bp, Artificial Sequence
  Description of Artificial Sequence: Synthetic oligonucleotide
ataatgcgtcgtttatcggtt

SEQ ID NO: 5117 - DNA, 22 bp, Artificial Sequence
  Description of Artificial Sequence: Synthetic oligonucleotide
ccgacactacaactatccgttc

SEQ ID NO: 5118 - DNA, 28 bp, Artificial Sequence
  Description of Artificial Sequence: Synthetic oligonucleotide
ggtgcgggttattgatcgggattttggt

SEQ ID NO: 5119 - DNA, 22 bp, Artificial Sequence
  Description of Artificial Sequence: Synthetic oligonucleotide
gtattgtgcgcgttttagatag

SEQ ID NO: 5120 - DNA, 22 bp, Artificial Sequence
  Description of Artificial Sequence: Synthetic oligonucleotide
agtattgtgcgcgttttagata

SEQ ID NO: 5121 - DNA, 22 bp, Artificial Sequence
  Description of Artificial Sequence: Synthetic oligonucleotide
tcaaaatcacgataaacgacaa

SEQ ID NO: 5122 - DNA, 30 bp, Artificial Sequence
  Description of Artificial Sequence: Synthetic oligonucleotide
ttttttcgagggggtattacgggtgaatgg

SEQ ID NO: 5123 - DNA, 22 bp, Artificial Sequence
  Description of Artificial Sequence: Synthetic oligonucleotide
gcgcgtaaacaaataaatacga

SEQ ID NO: 5124 - DNA, 21 bp, Artificial Sequence
  Description of Artificial Sequence: Synthetic oligonucleotide
ataatcgtcgttaccgtccac

SEQ ID NO: 5125 - DNA, 22 bp, Artificial Sequence
  Description of Artificial Sequence: Synthetic oligonucleotide
gaacggatagttgtagtgtcgg

SEQ ID NO: 5126 - DNA, 22 bp, Artificial Sequence
  Description of Artificial Sequence: Synthetic oligonucleotide
cgatcaatcaccaccgtataaa

SEQ ID NO: 5127 - DNA, 42 bp, Artificial Sequence
  Description of Artificial Sequence: Synthetic oligonucleotide
gttcgggggtttcgttttttttaagtttgaggagaattacga

SEQ ID NO: 5128 - DNA, 22 bp, Artificial Sequence
  Description of Artificial Sequence: Synthetic oligonucleotide
acgtgttttaggtgtacgagaa

SEQ ID NO: 5129 - DNA, 21 bp, Artificial Sequence
  Description of Artificial Sequence: Synthetic oligonucleotide
ataccgttctaacccaaatcg

SEQ ID NO: 5130 - DNA, 39 bp, Artificial Sequence
  Description of Artificial Sequence: Synthetic oligonucleotide
aatatttcgggagagtatttgggttttgtgttcgtttag

SEQ ID NO: 5131 - DNA, 21 bp, Artificial Sequence
  Description of Artificial Sequence: Synthetic oligonucleotide
cgataccgttctaacccaaat

SEQ ID NO: 5132 - DNA, 22 bp, Artificial Sequence
  Description of Artificial Sequence: Synthetic oligonucleotide
tattgtgcgcgttttagatagc

SEQ ID NO: 5133 - DNA, 27 bp, Artificial Sequence
  Description of Artificial Sequence: Synthetic oligonucleotide
atttcggcgagagcgggcgttttattt

SEQ ID NO: 5134 - DNA, 20 bp, Artificial Sequence
  Description of Artificial Sequence: Synthetic oligonucleotide
acgttacggtgagggtgata

SEQ ID NO: 5135 - DNA, 21 bp, Artificial Sequence
  Description of Artificial Sequence: Synthetic oligonucleotide
cgttgggtatagtggttatcg

SEQ ID NO: 5136 - DNA, 23 bp, Artificial Sequence
  Description of Artificial Sequence: Synthetic oligonucleotide
tctaaaaacttaataccgtcgcc

SEQ ID NO: 5137 - DNA, 20 bp, Artificial Sequence
  Description of Artificial Sequence: Synthetic oligonucleotide
ttgtgaattttacgaacggg

SEQ ID NO: 5138 - DNA, 40 bp, Artificial Sequence
  Description of Artificial Sequence: Synthetic oligonucleotide
tttacgttttgcgtttttttaatttcgagtagattaaggt

SEQ ID NO: 5139 - DNA, 21 bp, Artificial Sequence
  Description of Artificial Sequence: Synthetic oligonucleotide
cgaggcgttattttatttggt

SEQ ID NO: 5140 - DNA, 21 bp, Artificial Sequence
  Description of Artificial Sequence: Synthetic oligonucleotide
atatcgcggagttgtaggtgt

SEQ ID NO: 5141 - DNA, 24 bp, Artificial Sequence
  Description of Artificial Sequence: Synthetic oligonucleotide
agcgatttcggcgagagcgggcgt

SEQ ID NO: 5142 - DNA, 22 bp, Artificial Sequence
  Description of Artificial Sequence: Synthetic oligonucleotide
gttttcgaggcgttattttatt

SEQ ID NO: 5143 - DNA, 22 bp, Artificial Sequence
  Description of Artificial Sequence: Synthetic oligonucleotide
cgcgttatcattcacgtctaac

SEQ ID NO: 5144 - DNA, 22 bp, Artificial Sequence
  Description of Artificial Sequence: Synthetic oligonucleotide
tagttgtttttcgaggtgttcg

SEQ ID NO: 5145 - DNA, 21 bp, Artificial Sequence
  Description of Artificial Sequence: Synthetic oligonucleotide
acgttctccgaaatatccatt

SEQ ID NO: 5146 - DNA, 40 bp, Artificial Sequence
  Description of Artificial Sequence: Synthetic oligonucleotide
aaggtagagatttaggatattaacgataacgcgttttttt

SEQ ID NO: 5147 - DNA, 22 bp, Artificial Sequence
  Description of Artificial Sequence: Synthetic oligonucleotide
caaaatcacgataaacgacaac

SEQ ID NO: 5148 - DNA, 21 bp, Artificial Sequence
  Description of Artificial Sequence: Synthetic oligonucleotide
tgtttttcgaggtgttcgtta

SEQ ID NO: 5149 - DNA, 22 bp, Artificial Sequence
  Description of Artificial Sequence: Synthetic oligonucleotide
ggcgacgtgtttatttatattt

SEQ ID NO: 5150 - DNA, 21 bp, Artificial Sequence
  Description of Artificial Sequence: Synthetic oligonucleotide
tatacggtggtgattgatcgt

SEQ ID NO: 5151 - DNA, 22 bp, Artificial Sequence
  Description of Artificial Sequence: Synthetic oligonucleotide
cgaattatcgttctcgtctaaa

SEQ ID NO: 5152 - DNA, 20 bp, Artificial Sequence
  Description of Artificial Sequence: Synthetic oligonucleotide
gtggcgcgggacgggggttt

SEQ ID NO: 5153 - DNA, 21 bp, Artificial Sequence
  Description of Artificial Sequence: Synthetic oligonucleotide
gatctcgtaaataaaacgccc

SEQ ID NO: 5154 - DNA, 35 bp, Artificial Sequence
  Description of Artificial Sequence: Synthetic oligonucleotide
ggttatttggtgagtattgtgcgcgttttagatag

SEQ ID NO: 5155 - DNA, 20 bp, Artificial Sequence
  Description of Artificial Sequence: Synthetic oligonucleotide
taatgcgtcgtttatcggtt

SEQ ID NO: 5156 - DNA, 21 bp, Artificial Sequence
  Description of Artificial Sequence: Synthetic oligonucleotide
aacgatcaatcaccaccgtat

SEQ ID NO: 5157 - DNA, 20 bp, Artificial Sequence
  Description of Artificial Sequence: Synthetic oligonucleotide
gtgaattttacgaacggggt

SEQ ID NO: 5158 - DNA, 22 bp, Artificial Sequence
  Description of Artificial Sequence: Synthetic oligonucleotide
gtgagtattgtgcgcgttttag

SEQ ID NO: 5159 - DNA, 23 bp, Artificial Sequence
  Description of Artificial Sequence: Synthetic oligonucleotide
tcgatctcaaacaaataatcgtc

SEQ ID NO: 5160 - DNA, 22 bp, Artificial Sequence
  Description of Artificial Sequence: Synthetic oligonucleotide
ttatacggtggtgattgatcgt

SEQ ID NO: 5161 - DNA, 20 bp, Artificial Sequence
  Description of Artificial Sequence: Synthetic oligonucleotide
cgcgatcaaacacgtaacta

SEQ ID NO: 5162 - DNA, 20 bp, Artificial Sequence
  Description of Artificial Sequence: Synthetic oligonucleotide
acgatcaatcaccaccgtat

SEQ ID NO: 5163 - DNA, 21 bp, Artificial Sequence
  Description of Artificial Sequence: Synthetic oligonucleotide
cgcgttatcattcacgtctaa

SEQ ID NO: 5164 - DNA, 20 bp, Artificial Sequence
  Description of Artificial Sequence: Synthetic oligonucleotide
taatcgtcgttaccgtccac

SEQ ID NO: 5165 - DNA, 23 bp, Artificial Sequence
  Description of Artificial Sequence: Synthetic oligonucleotide
cgacactacaactatccgttctt

SEQ ID NO: 5166 - DNA, 22 bp, Artificial Sequence
  Description of Artificial Sequence: Synthetic oligonucleotide
tatacggtggtgattgatcgtt

SEQ ID NO: 5167 - DNA, 23 bp, Artificial Sequence
  Description of Artificial Sequence: Synthetic oligonucleotide
acgaattatcgttctcgtctaaa

SEQ ID NO: 5168 - DNA, 21 bp, Artificial Sequence
  Description of Artificial Sequence: Synthetic oligonucleotide
ggttatttacgttttgcgttt

SEQ ID NO: 5169 - DNA, 22 bp, Artificial Sequence
  Description of Artificial Sequence: Synthetic oligonucleotide
aatcacgataaacgacaacgac

SEQ ID NO: 5170 - DNA, 24 bp, Artificial Sequence
  Description of Artificial Sequence: Synthetic oligonucleotide
ttacgtgttttaggtgtacgagaa

SEQ ID NO: 5171 - DNA, 20 bp, Artificial Sequence
  Description of Artificial Sequence: Synthetic oligonucleotide
tgagtattgtgcgcgtttta

SEQ ID NO: 5172 - DNA, 24 bp, Artificial Sequence
  Description of Artificial Sequence: Synthetic oligonucleotide
aaaacaatcaacacgaacgtataa

SEQ ID NO: 5173 - DNA, 22 bp, Artificial Sequence
  Description of Artificial Sequence: Synthetic oligonucleotide
acggatagttgtagtgtcgggt

SEQ ID NO: 5174 - DNA, 22 bp, Artificial Sequence
  Description of Artificial Sequence: Synthetic oligonucleotide
acgatcaatcaccaccgtataa

SEQ ID NO: 5175 - DNA, 22 bp, Artificial Sequence
  Description of Artificial Sequence: Synthetic oligonucleotide
aaaatcacgataaacgacaacg

SEQ ID NO: 5176 - DNA, 22 bp, Artificial Sequence
  Description of Artificial Sequence: Synthetic oligonucleotide
gcgacggtattaagtttttaga

SEQ ID NO: 5177 - DNA, 22 bp, Artificial Sequence
  Description of Artificial Sequence: Synthetic oligonucleotide
acgtttcgttgggtatagtggt

SEQ ID NO: 5178 - DNA, 33 bp, Artificial Sequence
  Description of Artificial Sequence: Synthetic oligonucleotide
aacgttatcgacgtcgatgaaggttttaatggt

SEQ ID NO: 5179 - DNA, 22 bp, Artificial Sequence
  Description of Artificial Sequence: Synthetic oligonucleotide
ttgtttttcgaggtgttcgtta

SEQ ID NO: 5180 - DNA, 21 bp, Artificial Sequence
  Description of Artificial Sequence: Synthetic oligonucleotide
cacacgaattaaaccgatctt

SEQ ID NO: 5181 - DNA, 22 bp, Artificial Sequence
  Description of Artificial Sequence: Synthetic oligonucleotide
cgatctcaaacaaataatcgtc

SEQ ID NO: 5182 - DNA, 22 bp, Artificial Sequence
  Description of Artificial Sequence: Synthetic oligonucleotide
gataccgttctaacccaaatcg

SEQ ID NO: 5183 - DNA, 24 bp, Artificial Sequence
  Description of Artificial Sequence: Synthetic oligonucleotide
cgtaaacaaataaatacgaaaccc

SEQ ID NO: 5184 - DNA, 23 bp, Artificial Sequence
  Description of Artificial Sequence: Synthetic oligonucleotide
aagaacggatagttgtagtgtcg

SEQ ID NO: 5185 - DNA, 21 bp, Artificial Sequence
  Description of Artificial Sequence: Synthetic oligonucleotide
cgatcaatcaccaccgtataa

SEQ ID NO: 5186 - DNA, 19 bp, Artificial Sequence
  Description of Artificial Sequence: Synthetic oligonucleotide
aaaacgcgcacaatactca

SEQ ID NO: 5187 - DNA, 21 bp, Artificial Sequence
  Description of Artificial Sequence: Synthetic oligonucleotide
cggatagttgtagtgtcgggt

SEQ ID NO: 5188 - DNA, 22 bp, Artificial Sequence
  Description of Artificial Sequence: Synthetic oligonucleotide
tcgaggcgttattttatttggt

SEQ ID NO: 5189 - DNA, 23 bp, Artificial Sequence
  Description of Artificial Sequence: Synthetic oligonucleotide
ctatctaaaacgcgcacaatact

SEQ ID NO: 5190 - DNA, 22 bp, Artificial Sequence
  Description of Artificial Sequence: Synthetic oligonucleotide
gattgacgtgtaggttcgagat

SEQ ID NO: 5191 - DNA, 19 bp, Artificial Sequence
  Description of Artificial Sequence: Synthetic oligonucleotide
aaaaacgacctcgctcaac

SEQ ID NO: 5192 - DNA, 35 bp, Artificial Sequence
  Description of Artificial Sequence: Synthetic oligonucleotide
aacgataatgcgtcgtttatcggtttcgttttcgt

SEQ ID NO: 5193 - DNA, 20 bp, Artificial Sequence
  Description of Artificial Sequence: Synthetic oligonucleotide
tatcgcggagttgtaggtgt

SEQ ID NO: 5194 - DNA, 23 bp, Artificial Sequence
  Description of Artificial Sequence: Synthetic oligonucleotide
gcgatcaaacacgtaactactaa

SEQ ID NO: 5195 - DNA, 21 bp, Artificial Sequence
  Description of Artificial Sequence: Synthetic oligonucleotide
cgtttcgttgggtatagtggt

SEQ ID NO: 5196 - DNA, 23 bp, Artificial Sequence
  Description of Artificial Sequence: Synthetic oligonucleotide
gatctcaaacaaataatcgtcgt

SEQ ID NO: 5197 - DNA, 38 bp, Artificial Sequence
  Description of Artificial Sequence: Synthetic oligonucleotide
agcgggcgttttatttacgagatcgtggacggtaacga

SEQ ID NO: 5198 - DNA, 21 bp, Artificial Sequence
  Description of Artificial Sequence: Synthetic oligonucleotide
ttcgaggcgttattttatttg

SEQ ID NO: 5199 - DNA, 21 bp, Artificial Sequence
  Description of Artificial Sequence: Synthetic oligonucleotide
aaatcacgataaacgacaacg

SEQ ID NO: 5200 - DNA, 24 bp, Artificial Sequence
  Description of Artificial Sequence: Synthetic oligonucleotide
gcgtaaacaaataaatacgaaacc

SEQ ID NO: 5201 - DNA, 23 bp, Artificial Sequence
  Description of Artificial Sequence: Synthetic oligonucleotide
tacgtgttttaggtgtacgagaa

SEQ ID NO: 5202 - DNA, 22 bp, Artificial Sequence
  Description of Artificial Sequence: Synthetic oligonucleotide
acccgacactacaactatccgt

SEQ ID NO: 5203 - DNA, 23 bp, Artificial Sequence
  Description of Artificial Sequence: Synthetic oligonucleotide
aaacaatcaacacgaacgtataa

SEQ ID NO: 5204 - DNA, 22 bp, Artificial Sequence
  Description of Artificial Sequence: Synthetic oligonucleotide
acgttacggtgagggtgatagt

SEQ ID NO: 5205 - DNA, 21 bp, Artificial Sequence
  Description of Artificial Sequence: Synthetic oligonucleotide
gttacgcgacacctacaactc

SEQ ID NO: 5206 - DNA, 33 bp, Artificial Sequence
  Description of Artificial Sequence: Synthetic oligonucleotide
aacgcgttagtgatcgtgttttttacgttgtag

SEQ ID NO: 5207 - DNA, 21 bp, Artificial Sequence
  Description of Artificial Sequence: Synthetic oligonucleotide
atcacgataaacgacaacgac

SEQ ID NO: 5208 - DNA, 21 bp, Artificial Sequence
  Description of Artificial Sequence: Synthetic oligonucleotide
attgtgcgcgttttagatagc

SEQ ID NO: 5209 - DNA, 23 bp, Artificial Sequence
  Description of Artificial Sequence: Synthetic oligonucleotide
cttcacacgaattaaaccgatct

SEQ ID NO: 5210 - DNA, 21 bp, Artificial Sequence
  Description of Artificial Sequence: Synthetic oligonucleotide
atccaacgaacgatcaatcac

SEQ ID NO: 5211 - DNA, 20 bp, Artificial Sequence
  Description of Artificial Sequence: Synthetic oligonucleotide
gtggcgagtttttacgtttc

SEQ ID NO: 5212 - DNA, 22 bp, Artificial Sequence
  Description of Artificial Sequence: Synthetic oligonucleotide
cgataaccactatacccaacga

SEQ ID NO: 5213 - DNA, 38 bp, Artificial Sequence
  Description of Artificial Sequence: Synthetic oligonucleotide
aaggtgattgattttaacgataatagttcggttttcga

SEQ ID NO: 5214 - DNA, 22 bp, Artificial Sequence
  Description of Artificial Sequence: Synthetic oligonucleotide
tcgataaccactatacccaacg

SEQ ID NO: 5215 - DNA, 20 bp, Artificial Sequence
  Description of Artificial Sequence: Synthetic oligonucleotide
ggggttatttacgttttgcg

SEQ ID NO: 5216 - DNA, 20 bp, Artificial Sequence
  Description of Artificial Sequence: Synthetic oligonucleotide
cggggttatttacgttttgc

SEQ ID NO: 5217 - DNA, 20 bp, Artificial Sequence
  Description of Artificial Sequence: Synthetic oligonucleotide
acggggttatttacgttttg

SEQ ID NO: 5218 - DNA, 24 bp, Artificial Sequence
  Description of Artificial Sequence: Synthetic oligonucleotide
ctcaaacaaataatcgtcgttacc

SEQ ID NO: 5219 - DNA, 21 bp, Artificial Sequence
  Description of Artificial Sequence: Synthetic oligonucleotide
cccgacactacaactatccgt

SEQ ID NO: 5220 - DNA, 21 bp, Artificial Sequence
  Description of Artificial Sequence: Synthetic oligonucleotide
cgttacggtgagggtgatagt

SEQ ID NO: 5221 - DNA, 21 bp, Artificial Sequence
  Description of Artificial Sequence: Synthetic oligonucleotide
gttgtttttcgaggtgttcgt

SEQ ID NO: 5222 - DNA, 23 bp, Artificial Sequence
  Description of Artificial Sequence: Synthetic oligonucleotide
cgagaatgggtttcgtatttatt

SEQ ID NO: 5223 - DNA, 23 bp, Artificial Sequence
  Description of Artificial Sequence: Synthetic oligonucleotide
ttctaaaaacttaataccgtcgc

SEQ ID NO: 5224 - DNA, 22 bp, Artificial Sequence
  Description of Artificial Sequence: Synthetic oligonucleotide
agaacggatagttgtagtgtcg

SEQ ID NO: 5225 - DNA, 23 bp, Artificial Sequence
  Description of Artificial Sequence: Synthetic oligonucleotide
actcaaaatcacgataaacgaca

SEQ ID NO: 5226 - DNA, 21 bp, Artificial Sequence
  Description of Artificial Sequence: Synthetic oligonucleotide
agttgtttttcgaggtgttcg

SEQ ID NO: 5227 - DNA, 20 bp, Artificial Sequence
  Description of Artificial Sequence: Synthetic oligonucleotide
gcgaaacttaacgtccaatc

SEQ ID NO: 5228 - DNA, 33 bp, Artificial Sequence
  Description of Artificial Sequence: Synthetic oligonucleotide
atttatttgtttacgcgcgacgattacggtttt

SEQ ID NO: 5229 - DNA, 23 bp, Artificial Sequence
  Description of Artificial Sequence: Synthetic oligonucleotide
gtgttagacgtgaatgataacgc

SEQ ID NO: 5230 - DNA, 19 bp, Artificial Sequence
  Description of Artificial Sequence: Synthetic oligonucleotide
atgcgtcgtttatcggttt

SEQ ID NO: 5231 - DNA, 19 bp, Artificial Sequence
  Description of Artificial Sequence: Synthetic oligonucleotide
aatgcgtcgtttatcggtt

SEQ ID NO: 5232 - DNA, 20 bp, Artificial Sequence
  Description of Artificial Sequence: Synthetic oligonucleotide
cggcgacggtattaagtttt

SEQ ID NO: 5233 - DNA, 20 bp, Artificial Sequence
  Description of Artificial Sequence: Synthetic oligonucleotide
taccgttctaacccaaatcg

SEQ ID NO: 5234 - DNA, 23 bp, Artificial Sequence
  Description of Artificial Sequence: Synthetic oligonucleotide
tttacgtgttttaggtgtacgag

SEQ ID NO: 5235 - DNA, 21 bp, Artificial Sequence
  Description of Artificial Sequence: Synthetic oligonucleotide
cgttctaacccaaatcgaaat

SEQ ID NO: 5236 - DNA, 39 bp, Artificial Sequence
  Description of Artificial Sequence: Synthetic oligonucleotide
ataatatttcgggagagtatttgggttttgtgttcgttt

SEQ ID NO: 5237 - DNA, 21 bp, Artificial Sequence
  Description of Artificial Sequence: Synthetic oligonucleotide
atacggtggtgattgatcgtt

SEQ ID NO: 5238 - DNA, 20 bp, Artificial Sequence
  Description of Artificial Sequence: Synthetic oligonucleotide
cgaaacttaacgtccaatcc

SEQ ID NO: 5239 - DNA, 20 bp, Artificial Sequence
  Description of Artificial Sequence: Synthetic oligonucleotide
aataatcgtcgttaccgtcc

SEQ ID NO: 5240 - DNA, 23 bp, Artificial Sequence
  Description of Artificial Sequence: Synthetic oligonucleotide
cgttatcattcacgtctaacact

SEQ ID NO: 5241 - DNA, 19 bp, Artificial Sequence
  Description of Artificial Sequence: Synthetic oligonucleotide
aatcgtcgttaccgtccac

SEQ ID NO: 5242 - DNA, 22 bp, Artificial Sequence
  Description of Artificial Sequence: Synthetic oligonucleotide
tacgtgttttaggtgtacgaga

SEQ ID NO: 5243 - DNA, 39 bp, Artificial Sequence
  Description of Artificial Sequence: Synthetic oligonucleotide
taatatttcgggagagtatttgggttttgtgttcgttta

SEQ ID NO: 5244 - DNA, 21 bp, Artificial Sequence
  Description of Artificial Sequence: Synthetic oligonucleotide
aacggatagttgtagtgtcgg

SEQ ID NO: 5245 - DNA, 23 bp, Artificial Sequence
  Description of Artificial Sequence: Synthetic oligonucleotide
ttttcgaggcgttattttatttg

SEQ ID NO: 5246 - DNA, 19 bp, Artificial Sequence
  Description of Artificial Sequence: Synthetic oligonucleotide
tgtgaattttacgaacggg

SEQ ID NO: 5247 - DNA, 21 bp, Artificial Sequence
  Description of Artificial Sequence: Synthetic oligonucleotide
acgttacggtgagggtgatag

SEQ ID NO: 5248 - DNA, 20 bp, Artificial Sequence
  Description of Artificial Sequence: Synthetic oligonucleotide
gtaaataaaacgcccgctct

SEQ ID NO: 5249 - DNA, 20 bp, Artificial Sequence
  Description of Artificial Sequence: Synthetic oligonucleotide
ggtggcgagtttttacgttt

SEQ ID NO: 5250 - DNA, 20 bp, Artificial Sequence
  Description of Artificial Sequence: Synthetic oligonucleotide
gtggtgattgatcgttcgtt

SEQ ID NO: 5251 - DNA, 20 bp, Artificial Sequence
  Description of Artificial Sequence: Synthetic oligonucleotide
acacctacaactccgcgata

SEQ ID NO: 5252 - DNA, 24 bp, Artificial Sequence
  Description of Artificial Sequence: Synthetic oligonucleotide
taagaacggatagttgtagtgtcg

SEQ ID NO: 5253 - DNA, 22 bp, Artificial Sequence
  Description of Artificial Sequence: Synthetic oligonucleotide
atctcaaacaaataatcgtcgt

SEQ ID NO: 5254 - DNA, 19 bp, Artificial Sequence
  Description of Artificial Sequence: Synthetic oligonucleotide
gacggtggcgagtttttac

SEQ ID NO: 5255 - DNA, 20 bp, Artificial Sequence
  Description of Artificial Sequence: Synthetic oligonucleotide
cgttacggtgagggtgatag

SEQ ID NO: 5256 - DNA, 23 bp, Artificial Sequence
  Description of Artificial Sequence: Synthetic oligonucleotide
attatacgttcgtgttgattgtt

SEQ ID NO: 5257 - DNA, 22 bp, Artificial Sequence
  Description of Artificial Sequence: Synthetic oligonucleotide
ataaaataacgcctcgaaaacc

SEQ ID NO: 5258 - DNA, 32 bp, Artificial Sequence
  Description of Artificial Sequence: Synthetic oligonucleotide
gacggtggcgagtttttacgtttcgttatcgt

SEQ ID NO: 5259 - DNA, 20 bp, Artificial Sequence
  Description of Artificial Sequence: Synthetic oligonucleotide
tccaacgaacgatcaatcac

SEQ ID NO: 5260 - DNA, 19 bp, Artificial Sequence
  Description of Artificial Sequence: Synthetic oligonucleotide
cgccgaaatcgctatctaa

SEQ ID NO: 5261 - DNA, 19 bp, Artificial Sequence
  Description of Artificial Sequence: Synthetic oligonucleotide
atcgcggagttgtaggtgt

SEQ ID NO: 5262 - DNA, 23 bp, Artificial Sequence
  Description of Artificial Sequence: Synthetic oligonucleotide
ttttacgtgttttaggtgtacga

SEQ ID NO: 5263 - DNA, 22 bp, Artificial Sequence
  Description of Artificial Sequence: Synthetic oligonucleotide
cgttctaacccaaatcgaaatc

SEQ ID NO: 5264 - DNA, 19 bp, Artificial Sequence
  Description of Artificial Sequence: Synthetic oligonucleotide
gcgagaatgggtttcgtat

SEQ ID NO: 5265 - DNA, 20 bp, Artificial Sequence
  Description of Artificial Sequence: Synthetic oligonucleotide
aatggatatttcggagaacg

SEQ ID NO: 5266 - DNA, 22 bp, Artificial Sequence
  Description of Artificial Sequence: Synthetic oligonucleotide
cctcgaaaaccgaactattatc

SEQ ID NO: 5267 - DNA, 40 bp, Artificial Sequence
  Description of Artificial Sequence: Synthetic oligonucleotide
tttcgttatcgtatagattaacgtgaaggtgattgatttt

SEQ ID NO: 5268 - DNA, 19 bp, Artificial Sequence
  Description of Artificial Sequence: Synthetic oligonucleotide
aacgaacgatcaatcacca

SEQ ID NO: 5269 - DNA, 19 bp, Artificial Sequence
  Description of Artificial Sequence: Synthetic oligonucleotide
ccaacgaacgatcaatcac

SEQ ID NO: 5270 - DNA, 19 bp, Artificial Sequence
  Description of Artificial Sequence: Synthetic oligonucleotide
caacgaacgatcaatcacc

SEQ ID NO: 5271 - DNA, 20 bp, Artificial Sequence
  Description of Artificial Sequence: Synthetic oligonucleotide
aacgaacgatcaatcaccac

SEQ ID NO: 5272 - DNA, 24 bp, Artificial Sequence
  Description of Artificial Sequence: Synthetic oligonucleotide
attctaaaaacttaataccgtcgc

SEQ ID NO: 5273 - DNA, 20 bp, Artificial Sequence
  Description of Artificial Sequence: Synthetic oligonucleotide
ttgtgcgcgttttagatagc

SEQ ID NO: 5274 - DNA, 19 bp, Artificial Sequence
  Description of Artificial Sequence: Synthetic oligonucleotide
ggtggcgagtttttacgtt

SEQ ID NO: 5275 - DNA, 41 bp, Artificial Sequence
  Description of Artificial Sequence: Synthetic oligonucleotide
gttatcgtatagattaacgtgaaggtgattgattttaacga

SEQ ID NO: 5276 - DNA, 22 bp, Artificial Sequence
  Description of Artificial Sequence: Synthetic oligonucleotide
cgtgttttaggtgtacgagaat

SEQ ID NO: 5277 - DNA, 39 bp, Artificial Sequence
  Description of Artificial Sequence: Synthetic oligonucleotide
atatttcgggagagtatttgggttttgtgttcgtttagg

SEQ ID NO: 5278 - DNA, 19 bp, Artificial Sequence
  Description of Artificial Sequence: Synthetic oligonucleotide
cgtcgtttatcggtttcgt

SEQ ID NO: 5279 - DNA, 19 bp, Artificial Sequence
  Description of Artificial Sequence: Synthetic oligonucleotide
cgggattttggtaagaacg

SEQ ID NO: 5280 - DNA, 18 bp, Artificial Sequence
  Description of Artificial Sequence: Synthetic oligonucleotide
acgcgcacaatactcacc

SEQ ID NO: 5281 - DNA, 20 bp, Artificial Sequence
  Description of Artificial Sequence: Synthetic oligonucleotide
gtggacgtagatagcgggtt

SEQ ID NO: 5282 - DNA, 21 bp, Artificial Sequence
  Description of Artificial Sequence: Synthetic oligonucleotide
taacgaacacctcgaaaaaca

SEQ ID NO: 5283 - DNA, 36 bp, Artificial Sequence
  Description of Artificial Sequence: Synthetic oligonucleotide
gatcgcgagtttttgtgtcgttataatgttaagtgt

SEQ ID NO: 5284 - DNA, 21 bp, Artificial Sequence
  Description of Artificial Sequence: Synthetic oligonucleotide
cgtgttttaggtgtacgagaa

SEQ ID NO: 5285 - DNA, 19 bp, Artificial Sequence
  Description of Artificial Sequence: Synthetic oligonucleotide
tgtgcgcgttttagatagc

SEQ ID NO: 5286 - DNA, 21 bp, Artificial Sequence
  Description of Artificial Sequence: Synthetic oligonucleotide
gtgattgatcgttcgttggat

SEQ ID NO: 5287 - DNA, 21 bp, Artificial Sequence
  Description of Artificial Sequence: Synthetic oligonucleotide
gttagacgtgaatgataacgc

SEQ ID NO: 5288 - DNA, 20 bp, Artificial Sequence
  Description of Artificial Sequence: Synthetic oligonucleotide
tacggtggtgattgatcgtt

SEQ ID NO: 5289 - DNA, 19 bp, Artificial Sequence
  Description of Artificial Sequence: Synthetic oligonucleotide
cgttacggtgagggtgata

SEQ ID NO: 5290 - DNA, 20 bp, Artificial Sequence
  Description of Artificial Sequence: Synthetic oligonucleotide
gccgaaatcgctatctaaaa

SEQ ID NO: 5291 - DNA, 19 bp, Artificial Sequence
  Description of Artificial Sequence: Synthetic oligonucleotide
gtacgaatctcgccgctaa

SEQ ID NO: 5292 - DNA, 22 bp, Artificial Sequence
  Description of Artificial Sequence: Synthetic oligonucleotide
gtacgaaaactcttctccatcg

SEQ ID NO: 5293 - DNA, 22 bp, Artificial Sequence
  Description of Artificial Sequence: Synthetic oligonucleotide
tcgggtttgtacgttaattttt

SEQ ID NO: 5294 - DNA, 35 bp, Artificial Sequence
  Description of Artificial Sequence: Synthetic oligonucleotide
gattgttttttatacggattaggtcggttttgggg

SEQ ID NO: 5295 - DNA, 22 bp, Artificial Sequence
  Description of Artificial Sequence: Synthetic oligonucleotide
ttcgggtttgtacgttaatttt

SEQ ID NO: 5296 - DNA, 22 bp, Artificial Sequence
  Description of Artificial Sequence: Synthetic oligonucleotide
caccgtacaaatcaacgtaaaa

SEQ ID NO: 5297 - DNA, 22 bp, Artificial Sequence
  Description of Artificial Sequence: Synthetic oligonucleotide
gattattgtatttagcggagcg

SEQ ID NO: 5298 - DNA, 29 bp, Artificial Sequence
  Description of Artificial Sequence: Synthetic oligonucleotide
tttcgaagatcgggttgttgtcgttggag

SEQ ID NO: 5299 - DNA, 22 bp, Artificial Sequence
  Description of Artificial Sequence: Synthetic oligonucleotide
ttattgtatttagcggagcgtt

SEQ ID NO: 5300 - DNA, 22 bp, Artificial Sequence
  Description of Artificial Sequence: Synthetic oligonucleotide
taataaacactatacgcgccct

SEQ ID NO: 5301 - DNA, 22 bp, Artificial Sequence
  Description of Artificial Sequence: Synthetic oligonucleotide
ttaaataggtggtcgtcgttgt

SEQ ID NO: 5302 - DNA, 35 bp, Artificial Sequence
  Description of Artificial Sequence: Synthetic oligonucleotide
ttcgtaggtgagacgttcgttttcgtcgaagtcgt

SEQ ID NO: 5303 - DNA, 22 bp, Artificial Sequence
  Description of Artificial Sequence: Synthetic oligonucleotide
ataaacactatacgcgccctaa

SEQ ID NO: 5304 - DNA, 22 bp, Artificial Sequence
  Description of Artificial Sequence: Synthetic oligonucleotide
accctaaacgataacgaacctc

SEQ ID NO: 5305 - DNA, 44 bp, Artificial Sequence
  Description of Artificial Sequence: Synthetic oligonucleotide
gtcgttggagttaattatttttacgttgatttgtacggtggcgg

SEQ ID NO: 5306 - DNA, 22 bp, Artificial Sequence
  Description of Artificial Sequence: Synthetic oligonucleotide
taaataggtggtcgtcgttgtc

SEQ ID NO: 5307 - DNA, 22 bp, Artificial Sequence
  Description of Artificial Sequence: Synthetic oligonucleotide
aataaacactatacgcgcccta

SEQ ID NO: 5308 - DNA, 22 bp, Artificial Sequence
  Description of Artificial Sequence: Synthetic oligonucleotide
ctaataaacactatacgcgccc

SEQ ID NO: 5309 - DNA, 22 bp, Artificial Sequence
  Description of Artificial Sequence: Synthetic oligonucleotide
taccctaaacgataacgaacct

SEQ ID NO: 5310 - DNA, 22 bp, Artificial Sequence
  Description of Artificial Sequence: Synthetic oligonucleotide
tattgtatttagcggagcgttt

SEQ ID NO: 5311 - DNA, 22 bp, Artificial Sequence
  Description of Artificial Sequence: Synthetic oligonucleotide
attattgtatttagcggagcgt

SEQ ID NO: 5312 - DNA, 22 bp, Artificial Sequence
  Description of Artificial Sequence: Synthetic oligonucleotide
ggtttcgggtttgtacgttaat

SEQ ID NO: 5313 - DNA, 21 bp, Artificial Sequence
  Description of Artificial Sequence: Synthetic oligonucleotide
ccctaaacgataacgaacctc

SEQ ID NO: 5314 - DNA, 21 bp, Artificial Sequence
  Description of Artificial Sequence: Synthetic oligonucleotide
ttaaataggtggtcgtcgttg

SEQ ID NO: 5315 - DNA, 22 bp, Artificial Sequence
  Description of Artificial Sequence: Synthetic oligonucleotide
ctaaacgataacgaacctccac

SEQ ID NO: 5316 - DNA, 23 bp, Artificial Sequence
  Description of Artificial Sequence: Synthetic oligonucleotide
tcgatgattattgtatttagcgg

SEQ ID NO: 5317 - DNA, 22 bp, Artificial Sequence
  Description of Artificial Sequence: Synthetic oligonucleotide
taaacactatacgcgccctaaa

SEQ ID NO: 5318 - DNA, 22 bp, Artificial Sequence
  Description of Artificial Sequence: Synthetic oligonucleotide
ataatcgtactccccacgctac

SEQ ID NO: 5319 - DNA, 22 bp, Artificial Sequence
  Description of Artificial Sequence: Synthetic oligonucleotide
gggcgcgtatagtgtttattag

SEQ ID NO: 5320 - DNA, 29 bp, Artificial Sequence
  Description of Artificial Sequence: Synthetic oligonucleotide
agcgttgcgcggtatttgtagtttcgcgg

SEQ ID NO: 5321 - DNA, 22 bp, Artificial Sequence
  Description of Artificial Sequence: Synthetic oligonucleotide
tagggcgcgtatagtgtttatt

SEQ ID NO: 5322 - DNA, 21 bp, Artificial Sequence
  Description of Artificial Sequence: Synthetic oligonucleotide
ccaccgtacaaatcaacgtaa

SEQ ID NO: 5323 - DNA, 22 bp, Artificial Sequence
  Description of Artificial Sequence: Synthetic oligonucleotide
aacgccacgataaaaataacaa

SEQ ID NO: 5324 - DNA, 22 bp, Artificial Sequence
  Description of Artificial Sequence: Synthetic oligonucleotide
tttagggcgcgtatagtgttta

SEQ ID NO: 5325 - DNA, 27 bp, Artificial Sequence
  Description of Artificial Sequence: Synthetic oligonucleotide
tgtcgttttgtagcgtggggagtacga

SEQ ID NO: 5326 - DNA, 21 bp, Artificial Sequence
  Description of Artificial Sequence: Synthetic oligonucleotide
atcacgatcaaactcatcgac

SEQ ID NO: 5327 - DNA, 22 bp, Artificial Sequence
  Description of Artificial Sequence: Synthetic oligonucleotide
gttagtgattcgtattagggcg

SEQ ID NO: 5328 - DNA, 38 bp, Artificial Sequence
  Description of Artificial Sequence: Synthetic oligonucleotide
ttcgtttagcgttttttggcgtacggagacgaaatcga

SEQ ID NO: 5329 - DNA, 22 bp, Artificial Sequence
  Description of Artificial Sequence: Synthetic oligonucleotide
accgtacaaatcaacgtaaaaa

SEQ ID NO: 5330 - DNA, 21 bp, Artificial Sequence
  Description of Artificial Sequence: Synthetic oligonucleotide
aaacaacgccacgataaaaat

SEQ ID NO: 5331 - DNA, 22 bp, Artificial Sequence
  Description of Artificial Sequence: Synthetic oligonucleotide
cgatgattattgtatttagcgg

SEQ ID NO: 5332 - DNA, 22 bp, Artificial Sequence
  Description of Artificial Sequence: Synthetic oligonucleotide
cggttagtgattcgtattaggg

SEQ ID NO: 5333 - DNA, 22 bp, Artificial Sequence
  Description of Artificial Sequence: Synthetic oligonucleotide
ataataactaaccgcccgctaa

SEQ ID NO: 5334 - DNA, 22 bp, Artificial Sequence
  Description of Artificial Sequence: Synthetic oligonucleotide
ggttgtcgttttcgtttagaat

SEQ ID NO: 5335 - DNA, 28 bp, Artificial Sequence
  Description of Artificial Sequence: Synthetic oligonucleotide
tgatcgcgaacgatttggtggagttgag

SEQ ID NO: 5336 - DNA, 22 bp, Artificial Sequence
  Description of Artificial Sequence: Synthetic oligonucleotide
aaaacaacgccacgataaaaat

SEQ ID NO: 5337 - DNA, 21 bp, Artificial Sequence
  Description of Artificial Sequence: Synthetic oligonucleotide
aacactatacgcgccctaaac

SEQ ID NO: 5338 - DNA, 23 bp, Artificial Sequence
  Description of Artificial Sequence: Synthetic oligonucleotide
cgggtttgtacgttaatttttag

SEQ ID NO: 5339 - DNA, 23 bp, Artificial Sequence
  Description of Artificial Sequence: Synthetic oligonucleotide
tttcgggtttgtacgttaatttt

SEQ ID NO: 5340 - DNA, 21 bp, Artificial Sequence
  Description of Artificial Sequence: Synthetic oligonucleotide
gttgtttagggcgcgtatagt

SEQ ID NO: 5341 - DNA, 22 bp, Artificial Sequence
  Description of Artificial Sequence: Synthetic oligonucleotide
aacaacgccacgataaaaataa

SEQ ID NO: 5342 - DNA, 21 bp, Artificial Sequence
  Description of Artificial Sequence: Synthetic oligonucleotide
gtttagggcgcgtatagtgtt

SEQ ID NO: 5343 - DNA, 21 bp, Artificial Sequence
  Description of Artificial Sequence: Synthetic oligonucleotide
aaacgctccgctaaatacaat

SEQ ID NO: 5344 - DNA, 22 bp, Artificial Sequence
  Description of Artificial Sequence: Synthetic oligonucleotide
tcgatggagaagagttttcgta

SEQ ID NO: 5345 - DNA, 26 bp, Artificial Sequence
  Description of Artificial Sequence: Synthetic oligonucleotide
ggcgtcggtggcgtttagatcgatga

SEQ ID NO: 5346 - DNA, 21 bp, Artificial Sequence
  Description of Artificial Sequence: Synthetic oligonucleotide
ttagggcgcgtatagtgttta

SEQ ID NO: 5347 - DNA, 21 bp, Artificial Sequence
  Description of Artificial Sequence: Synthetic oligonucleotide
aaataggtggtcgtcgttgtc

SEQ ID NO: 5348 - DNA, 22 bp, Artificial Sequence
  Description of Artificial Sequence: Synthetic oligonucleotide
ccgtacaaatcaacgtaaaaat

SEQ ID NO: 5349 - DNA, 22 bp, Artificial Sequence
  Description of Artificial Sequence: Synthetic oligonucleotide
acgaaaactcttctccatcgac

SEQ ID NO: 5350 - DNA, 39 bp, Artificial Sequence
  Description of Artificial Sequence: Synthetic oligonucleotide
agtttagattgttttttatacggattaggtcggttttgg

SEQ ID NO: 5351 - DNA, 21 bp, Artificial Sequence
  Description of Artificial Sequence: Synthetic oligonucleotide
attgtatttagcggagcgttt

SEQ ID NO: 5352 - DNA, 20 bp, Artificial Sequence
  Description of Artificial Sequence: Synthetic oligonucleotide
caataatcgtactccccacg

SEQ ID NO: 5353 - DNA, 22 bp, Artificial Sequence
  Description of Artificial Sequence: Synthetic oligonucleotide
ttagggcgcgtatagtgtttat

SEQ ID NO: 5354 - DNA, 21 bp, Artificial Sequence
  Description of Artificial Sequence: Synthetic oligonucleotide
ctaaacgataacgaacctcca

SEQ ID NO: 5355 - DNA, 20 bp, Artificial Sequence
  Description of Artificial Sequence: Synthetic oligonucleotide
aaataaccgaccacgacaaa

SEQ ID NO: 5356 - DNA, 22 bp, Artificial Sequence
  Description of Artificial Sequence: Synthetic oligonucleotide
gagcggtagcgatatgttttag

SEQ ID NO: 5357 - DNA, 35 bp, Artificial Sequence
  Description of Artificial Sequence: Synthetic oligonucleotide
ttatcgagcggatgatgagtttggttattgcggat

SEQ ID NO: 5358 - DNA, 20 bp, Artificial Sequence
  Description of Artificial Sequence: Synthetic oligonucleotide
aaaataaccgaccacgacaa

SEQ ID NO: 5359 - DNA, 22 bp, Artificial Sequence
  Description of Artificial Sequence: Synthetic oligonucleotide
ccaccgtacaaatcaacgtaaa

SEQ ID NO: 5360 - DNA, 22 bp, Artificial Sequence
  Description of Artificial Sequence: Synthetic oligonucleotide
agcgttttcgggtagttttatt

SEQ ID NO: 5361 - DNA, 21 bp, Artificial Sequence
  Description of Artificial Sequence: Synthetic oligonucleotide
taatcgtactccccacgctac

SEQ ID NO: 5362 - DNA, 22 bp, Artificial Sequence
  Description of Artificial Sequence: Synthetic oligonucleotide
aaacactatacgcgccctaaac

SEQ ID NO: 5363 - DNA, 21 bp, Artificial Sequence
  Description of Artificial Sequence: Synthetic oligonucleotide
tacgaaaactcttctccatcg

SEQ ID NO: 5364 - DNA, 22 bp, Artificial Sequence
  Description of Artificial Sequence: Synthetic oligonucleotide
tctaataaacactatacgcgcc

SEQ ID NO: 5365 - DNA, 21 bp, Artificial Sequence
  Description of Artificial Sequence: Synthetic oligonucleotide
cgaaaactcttctccatcgac

SEQ ID NO: 5366 - DNA, 22 bp, Artificial Sequence
  Description of Artificial Sequence: Synthetic oligonucleotide
gtttagggcgcgtatagtgttt

SEQ ID NO: 5367 - DNA, 23 bp, Artificial Sequence
  Description of Artificial Sequence: Synthetic oligonucleotide
accgtacaaatcaacgtaaaaat

SEQ ID NO: 5368 - DNA, 22 bp, Artificial Sequence
  Description of Artificial Sequence: Synthetic oligonucleotide
gagcgttttcgggtagttttat

SEQ ID NO: 5369 - DNA, 21 bp, Artificial Sequence
  Description of Artificial Sequence: Synthetic oligonucleotide
accctaaacgataacgaacct

SEQ ID NO: 5370 - DNA, 21 bp, Artificial Sequence
  Description of Artificial Sequence: Synthetic oligonucleotide
aaataaccgaccacgacaaac

SEQ ID NO: 5371 - DNA, 22 bp, Artificial Sequence
  Description of Artificial Sequence: Synthetic oligonucleotide
gtttagagttacgatgagcggt

SEQ ID NO: 5372 - DNA, 20 bp, Artificial Sequence
  Description of Artificial Sequence: Synthetic oligonucleotide
atattcgccaacgacaaaaa

SEQ ID NO: 5373 - DNA, 22 bp, Artificial Sequence
  Description of Artificial Sequence: Synthetic oligonucleotide
gtttatttcgatttggttcgag

SEQ ID NO: 5374 - DNA, 23 bp, Artificial Sequence
  Description of Artificial Sequence: Synthetic oligonucleotide
ggagaaggagggcgcgttgtcgt

SEQ ID NO: 5375 - DNA, 21 bp, Artificial Sequence
  Description of Artificial Sequence: Synthetic oligonucleotide
gacaccgcgaaactacaaata

SEQ ID NO: 5376 - DNA, 22 bp, Artificial Sequence
  Description of Artificial Sequence: Synthetic oligonucleotide
gagtagcgtttttcgagatgtt

SEQ ID NO: 5377 - DNA, 21 bp, Artificial Sequence
  Description of Artificial Sequence: Synthetic oligonucleotide
taataactaaccgcccgctaa

SEQ ID NO: 5378 - DNA, 21 bp, Artificial Sequence
  Description of Artificial Sequence: Synthetic oligonucleotide
tttagggcgcgtatagtgttt

SEQ ID NO: 5379 - DNA, 21 bp, Artificial Sequence
  Description of Artificial Sequence: Synthetic oligonucleotide
ctaaaccgcgaacaacaaaat

SEQ ID NO: 5380 - DNA, 22 bp, Artificial Sequence
  Description of Artificial Sequence: Synthetic oligonucleotide
ttttacgttgatttgtacggtg

SEQ ID NO: 5381 - DNA, 43 bp, Artificial Sequence
  Description of Artificial Sequence: Synthetic oligonucleotide
aacgtggaggttcgttatcgtttagggtagttagtacgagcgt

SEQ ID NO: 5382 - DNA, 22 bp, Artificial Sequence
  Description of Artificial Sequence: Synthetic oligonucleotide
gctaccgctcatcgtaactcta

SEQ ID NO: 5383 - DNA, 21 bp, Artificial Sequence
  Description of Artificial Sequence: Synthetic oligonucleotide
ttgttttcgcgtttgtatttg

SEQ ID NO: 5384 - DNA, 29 bp, Artificial Sequence
  Description of Artificial Sequence: Synthetic oligonucleotide
ggcgatggtgattatggtcgttaggagga

SEQ ID NO: 5385 - DNA, 21 bp, Artificial Sequence
  Description of Artificial Sequence: Synthetic oligonucleotide
cctaaacgataacgaacctcc

SEQ ID NO: 5386 - DNA, 39 bp, Artificial Sequence
  Description of Artificial Sequence: Synthetic oligonucleotide
gagcgttttcgggtagttttattaagtaggatggcgttt

SEQ ID NO: 5387 - DNA, 20 bp, Artificial Sequence
  Description of Artificial Sequence: Synthetic oligonucleotide
taaaccgcgaacaacaaaat

SEQ ID NO: 5388 - DNA, 20 bp, Artificial Sequence
  Description of Artificial Sequence: Synthetic oligonucleotide
aataggtggtcgtcgttgtc

SEQ ID NO: 5389 - DNA, 23 bp, Artificial Sequence
  Description of Artificial Sequence: Synthetic oligonucleotide
tgtcgttttcgtttagaattttg

SEQ ID NO: 5390 - DNA, 29 bp, Artificial Sequence
  Description of Artificial Sequence: Synthetic oligonucleotide
ttcgtttcgcgttacgatggttacgttgt

SEQ ID NO: 5391 - DNA, 21 bp, Artificial Sequence
  Description of Artificial Sequence: Synthetic oligonucleotide
agggcgcgtatagtgtttatt

SEQ ID NO: 5392 - DNA, 21 bp, Artificial Sequence
  Description of Artificial Sequence: Synthetic oligonucleotide
tattgtatttagcggagcgtt

SEQ ID NO: 5393 - DNA, 21 bp, Artificial Sequence
  Description of Artificial Sequence: Synthetic oligonucleotide
aaaaacaacgccacgataaaa

SEQ ID NO: 5394 - DNA, 21 bp, Artificial Sequence
  Description of Artificial Sequence: Synthetic oligonucleotide
acgccacgataaaaataacaa

SEQ ID NO: 5395 - DNA, 22 bp, Artificial Sequence
  Description of Artificial Sequence: Synthetic oligonucleotide
cgtaacgcccgtaataaaacta

SEQ ID NO: 5396 - DNA, 20 bp, Artificial Sequence
  Description of Artificial Sequence: Synthetic oligonucleotide
ttatcgagcggatgatgagt

SEQ ID NO: 5397 - DNA, 29 bp, Artificial Sequence
  Description of Artificial Sequence: Synthetic oligonucleotide
tattgcggatagggtaggtttgtcgtggt

SEQ ID NO: 5398 - DNA, 21 bp, Artificial Sequence
  Description of Artificial Sequence: Synthetic oligonucleotide
taaaaataaccgaccacgaca

SEQ ID NO: 5399 - DNA, 22 bp, Artificial Sequence
  Description of Artificial Sequence: Synthetic oligonucleotide
ttagagttacgatgagcggtag

SEQ ID NO: 5400 - DNA, 22 bp, Artificial Sequence
  Description of Artificial Sequence: Synthetic oligonucleotide
gacaacgacgaccacctattta

SEQ ID NO: 5401 - DNA, 21 bp, Artificial Sequence
  Description of Artificial Sequence: Synthetic oligonucleotide
tattacgggcgttacgttttt

SEQ ID NO: 5402 - DNA, 24 bp, Artificial Sequence
  Description of Artificial Sequence: Synthetic oligonucleotide
tgcggatttcgtcgttggacgggt

SEQ ID NO: 5403 - DNA, 21 bp, Artificial Sequence
  Description of Artificial Sequence: Synthetic oligonucleotide
tttattacgggcgttacgttt

SEQ ID NO: 5404 - DNA, 21 bp, Artificial Sequence
  Description of Artificial Sequence: Synthetic oligonucleotide
cgaacgtctcacctacgaaat

SEQ ID NO: 5405 - DNA, 22 bp, Artificial Sequence
  Description of Artificial Sequence: Synthetic oligonucleotide
tgtcgtggtcggttatttttat

SEQ ID NO: 5406 - DNA, 35 bp, Artificial Sequence
  Description of Artificial Sequence: Synthetic oligonucleotide
gtcgttggacgggtcgattttaaataggtggtcgt

SEQ ID NO: 5407 - DNA, 22 bp, Artificial Sequence
  Description of Artificial Sequence: Synthetic oligonucleotide
acacgataataactaaccgccc

SEQ ID NO: 5408 - DNA, 21 bp, Artificial Sequence
  Description of Artificial Sequence: Synthetic oligonucleotide
aaaataaccgaccacgacaaa

SEQ ID NO: 5409 - DNA, 21 bp, Artificial Sequence
  Description of Artificial Sequence: Synthetic oligonucleotide
aatccgcacttacaactaccg

SEQ ID NO: 5410 - DNA, 22 bp, Artificial Sequence
  Description of Artificial Sequence: Synthetic oligonucleotide
ttatgacgtttatggcgttttt

SEQ ID NO: 5411 - DNA, 25 bp, Artificial Sequence
  Description of Artificial Sequence: Synthetic oligonucleotide
agttgcgggtggttgtattcggcga

SEQ ID NO: 5412 - DNA, 23 bp, Artificial Sequence
  Description of Artificial Sequence: Synthetic oligonucleotide
atctaataaacactatacgcgcc

SEQ ID NO: 5413 - DNA, 20 bp, Artificial Sequence
  Description of Artificial Sequence: Synthetic oligonucleotide
acgaacgtctcacctacgaa

SEQ ID NO: 5414 - DNA, 22 bp, Artificial Sequence
  Description of Artificial Sequence: Synthetic oligonucleotide
acgccacgataaaaataacaat

SEQ ID NO: 5415 - DNA, 20 bp, Artificial Sequence
  Description of Artificial Sequence: Synthetic oligonucleotide
gttgtttagggcgcgtatag

SEQ ID NO: 5416 - DNA, 22 bp, Artificial Sequence
  Description of Artificial Sequence: Synthetic oligonucleotide
acaacgccacgataaaaataac

SEQ ID NO: 5417 - DNA, 21 bp, Artificial Sequence
  Description of Artificial Sequence: Synthetic oligonucleotide
tgtttagggcgcgtatagtgt

SEQ ID NO: 5418 - DNA, 20 bp, Artificial Sequence
  Description of Artificial Sequence: Synthetic oligonucleotide
atccgcacttacaactaccg

SEQ ID NO: 5419 - DNA, 22 bp, Artificial Sequence
  Description of Artificial Sequence: Synthetic oligonucleotide
ttattacgggcgttacgttttt

SEQ ID NO: 5420 - DNA, 22 bp, Artificial Sequence
  Description of Artificial Sequence: Synthetic oligonucleotide
ttttattacgggcgttacgttt

SEQ ID NO: 5421 - DNA, 22 bp, Artificial Sequence
  Description of Artificial Sequence: Synthetic oligonucleotide
aaaacgacaccgtatcctactc

SEQ ID NO: 5422 - DNA, 21 bp, Artificial Sequence
  Description of Artificial Sequence: Synthetic oligonucleotide
tttcgttcgtgggatttatag

SEQ ID NO: 5423 - DNA, 26 bp, Artificial Sequence
  Description of Artificial Sequence: Synthetic oligonucleotide
tacgtcgtcgatgtgcgagggtagga

SEQ ID NO: 5424 - DNA, 22 bp, Artificial Sequence
  Description of Artificial Sequence: Synthetic oligonucleotide
aaacaacgccacgataaaaata

SEQ ID NO: 5425 - DNA, 23 bp, Artificial Sequence
  Description of Artificial Sequence: Synthetic oligonucleotide
ggcgcgtatagtgtttattagat

SEQ ID NO: 5426 - DNA, 20 bp, Artificial Sequence
  Description of Artificial Sequence: Synthetic oligonucleotide
aacaacgccacgataaaaat

SEQ ID NO: 5427 - DNA, 21 bp, Artificial Sequence
  Description of Artificial Sequence: Synthetic oligonucleotide
cgatggagaagagttttcgta

SEQ ID NO: 5428 - DNA, 21 bp, Artificial Sequence
  Description of Artificial Sequence: Synthetic oligonucleotide
ctaaaccaaaacgacaccgta

SEQ ID NO: 5429 - DNA, 21 bp, Artificial Sequence
  Description of Artificial Sequence: Synthetic oligonucleotide
tcgaagttaaaggagcgtagg

SEQ ID NO: 5430 - DNA, 38 bp, Artificial Sequence
  Description of Artificial Sequence: Synthetic oligonucleotide
agatggtttcgttcgtgggatttatagatatataggtg

SEQ ID NO: 5431 - DNA, 21 bp, Artificial Sequence
  Description of Artificial Sequence: Synthetic oligonucleotide
aataatcgtactccccacgct

SEQ ID NO: 5432 - DNA, 21 bp, Artificial Sequence
  Description of Artificial Sequence: Synthetic oligonucleotide
cacgataataactaaccgccc

SEQ ID NO: 5433 - DNA, 20 bp, Artificial Sequence
  Description of Artificial Sequence: Synthetic oligonucleotide
aataaccgaccacgacaaac

SEQ ID NO: 5434 - DNA, 20 bp, Artificial Sequence
  Description of Artificial Sequence: Synthetic oligonucleotide
aataatcgtactccccacgc

SEQ ID NO: 5435 - DNA, 21 bp, Artificial Sequence
  Description of Artificial Sequence: Synthetic oligonucleotide
ataatcgtactccccacgcta

SEQ ID NO: 5436 - DNA, 23 bp, Artificial Sequence
  Description of Artificial Sequence: Synthetic oligonucleotide
tcgttttcgtttagaattttgat

SEQ ID NO: 5437 - DNA, 20 bp, Artificial Sequence
  Description of Artificial Sequence: Synthetic oligonucleotide
aactcatcatccgctcgata

SEQ ID NO: 5438 - DNA, 22 bp, Artificial Sequence
  Description of Artificial Sequence: Synthetic oligonucleotide
cggtagcgatatgttttagtgg

SEQ ID NO: 5439 - DNA, 37 bp, Artificial Sequence
  Description of Artificial Sequence: Synthetic oligonucleotide
ttgttcgttatttattcgtggtattttttcgggaagg

SEQ ID NO: 5440 - DNA, 20 bp, Artificial Sequence
  Description of Artificial Sequence: Synthetic oligonucleotide
tcacgatcaaactcatcgac

SEQ ID NO: 5441 - DNA, 20 bp, Artificial Sequence
  Description of Artificial Sequence: Synthetic oligonucleotide
acaaaatcaccatacgctcg

SEQ ID NO: 5442 - DNA, 22 bp, Artificial Sequence
  Description of Artificial Sequence: Synthetic oligonucleotide
tattaagtaggatggcgtttcg

SEQ ID NO: 5443 - DNA, 22 bp, Artificial Sequence
  Description of Artificial Sequence: Synthetic oligonucleotide
aataaaaataaccgaccacgac

SEQ ID NO: 5444 - DNA, 20 bp, Artificial Sequence
  Description of Artificial Sequence: Synthetic oligonucleotide
gatgagcggtagcgatatgt

SEQ ID NO: 5445 - DNA, 22 bp, Artificial Sequence
  Description of Artificial Sequence: Synthetic oligonucleotide
agcggtagcgatatgttttagt

SEQ ID NO: 5446 - DNA, 21 bp, Artificial Sequence
  Description of Artificial Sequence: Synthetic oligonucleotide
gtttatcgagcggatgatgag

SEQ ID NO: 5447 - DNA, 21 bp, Artificial Sequence
  Description of Artificial Sequence: Synthetic oligonucleotide
tttatcgagcggatgatgagt

SEQ ID NO: 5448 - DNA, 21 bp, Artificial Sequence
  Description of Artificial Sequence: Synthetic oligonucleotide
gaacgtctcacctacgaaatc

SEQ ID NO: 5449 - DNA, 23 bp, Artificial Sequence
  Description of Artificial Sequence: Synthetic oligonucleotide
tttagagttacgatgagcggtag

SEQ ID NO: 5450 - DNA, 21 bp, Artificial Sequence
  Description of Artificial Sequence: Synthetic oligonucleotide
acaacgccacgataaaaataa

SEQ ID NO: 5451 - DNA, 22 bp, Artificial Sequence
  Description of Artificial Sequence: Synthetic oligonucleotide
gacaccgcgaaactacaaatac

SEQ ID NO: 5452 - DNA, 20 bp, Artificial Sequence
  Description of Artificial Sequence: Synthetic oligonucleotide
tcgtaggtgagacgttcgtt

SEQ ID NO: 5453 - DNA, 29 bp, Artificial Sequence
  Description of Artificial Sequence: Synthetic oligonucleotide
gtcgaagtcgttgtttagggcgcgtatag

SEQ ID NO: 5454 - DNA, 21 bp, Artificial Sequence
  Description of Artificial Sequence: Synthetic oligonucleotide
caccgtacaaatcaacgtaaa

SEQ ID NO: 5455 - DNA, 19 bp, Artificial Sequence
  Description of Artificial Sequence: Synthetic oligonucleotide
cgccaataatcgtactccc

SEQ ID NO: 5456 - DNA, 20 bp, Artificial Sequence
  Description of Artificial Sequence: Synthetic oligonucleotide
ttgtttagggcgcgtatagt

SEQ ID NO: 5457 - DNA, 20 bp, Artificial Sequence
  Description of Artificial Sequence: Synthetic oligonucleotide
ttagggcgcgtatagtgttt

SEQ ID NO: 5458 - DNA, 20 bp, Artificial Sequence
  Description of Artificial Sequence: Synthetic oligonucleotide
aatcgtactccccacgctac

SEQ ID NO: 5459 - DNA, 22 bp, Artificial Sequence
  Description of Artificial Sequence: Synthetic oligonucleotide
gcggtagcgatatgttttagtg

SEQ ID NO: 5460 - DNA, 21 bp, Artificial Sequence
  Description of Artificial Sequence: Synthetic oligonucleotide
gataataactaaccgcccgct

SEQ ID NO: 5461 - DNA, 22 bp, Artificial Sequence
  Description of Artificial Sequence: Synthetic oligonucleotide
ctataaatcccacgaacgaaac

SEQ ID NO: 5462 - DNA, 20 bp, Artificial Sequence
  Description of Artificial Sequence: Synthetic oligonucleotide
gggcgttttcgagtttttag

SEQ ID NO: 5463 - DNA, 28 bp, Artificial Sequence
  Description of Artificial Sequence: Synthetic oligonucleotide
tgttcgaagttaaaggagcgtagggcgt

SEQ ID NO: 5464 - DNA, 20 bp, Artificial Sequence
  Description of Artificial Sequence: Synthetic oligonucleotide
aaaaataaccgaccacgaca

SEQ ID NO: 5465 - DNA, 21 bp, Artificial Sequence
  Description of Artificial Sequence: Synthetic oligonucleotide
gtttcgggtttgtacgttaat

SEQ ID NO: 5466 - DNA, 20 bp, Artificial Sequence
  Description of Artificial Sequence: Synthetic oligonucleotide
tgtttagggcgcgtatagtg

SEQ ID NO: 5467 - DNA, 24 bp, Artificial Sequence
  Description of Artificial Sequence: Synthetic oligonucleotide
gtcgttttcgtttagaattttgat

SEQ ID NO: 5468 - DNA, 20 bp, Artificial Sequence
  Description of Artificial Sequence: Synthetic oligonucleotide
aacgaacgtctcacctacga

SEQ ID NO: 5469 - DNA, 22 bp, Artificial Sequence
  Description of Artificial Sequence: Synthetic oligonucleotide
gtcgtggtcggttatttttatt

SEQ ID NO: 5470 - DNA, 22 bp, Artificial Sequence
  Description of Artificial Sequence: Synthetic oligonucleotide
aaacgacaccgtatcctactct

SEQ ID NO: 5471 - DNA, 19 bp, Artificial Sequence
  Description of Artificial Sequence: Synthetic oligonucleotide
gcgccaataatcgtactcc

SEQ ID NO: 5472 - DNA, 21 bp, Artificial Sequence
  Description of Artificial Sequence: Synthetic oligonucleotide
gtaggtgagacgttcgttttc

SEQ ID NO: 5473 - DNA, 30 bp, Artificial Sequence
  Description of Artificial Sequence: Synthetic oligonucleotide
aagtcgttgtttagggcgcgtatagtgttt

SEQ ID NO: 5474 - DNA, 22 bp, Artificial Sequence
  Description of Artificial Sequence: Synthetic oligonucleotide
aataatcgtactccccacgcta

SEQ ID NO: 5475 - DNA, 19 bp, Artificial Sequence
  Description of Artificial Sequence: Synthetic oligonucleotide
cacgctacaaaacgacacc

SEQ ID NO: 5476 - DNA, 29 bp, Artificial Sequence
  Description of Artificial Sequence: Synthetic oligonucleotide
agtttaggttagcgttgcgcggtatttgt

SEQ ID NO: 5477 - DNA, 20 bp, Artificial Sequence
  Description of Artificial Sequence: Synthetic oligonucleotide
cctacgctcctttaacttcg

SEQ ID NO: 5478 - DNA, 22 bp, Artificial Sequence
  Description of Artificial Sequence: Synthetic oligonucleotide
gttatttttatcgtggcgttgt

SEQ ID NO: 5479 - DNA, 25 bp, Artificial Sequence
  Description of Artificial Sequence: Synthetic oligonucleotide
agtgcgcgggcgttttcgagttttt

SEQ ID NO: 5480 - DNA, 21 bp, Artificial Sequence
  Description of Artificial Sequence: Synthetic oligonucleotide
ttattgtatttagcggagcgt

SEQ ID NO: 5481 - DNA, 22 bp, Artificial Sequence
  Description of Artificial Sequence: Synthetic oligonucleotide
tgtttagagttacgatgagcgg

SEQ ID NO: 5482 - DNA, 21 bp, Artificial Sequence
  Description of Artificial Sequence: Synthetic oligonucleotide
ctcgataaacgaatcccttcc

SEQ ID NO: 5483 - DNA, 39 bp, Artificial Sequence
  Description of Artificial Sequence: Synthetic oligonucleotide
agcgatatgttttagtggtgttgttcgttatttattcgt

SEQ ID NO: 5484 - DNA, 22 bp, Artificial Sequence
  Description of Artificial Sequence: Synthetic oligonucleotide
ctaccgctcatcgtaactctaa

SEQ ID NO: 5485 - DNA, 22 bp, Artificial Sequence
  Description of Artificial Sequence: Synthetic oligonucleotide
acgtaacgcccgtaataaaact

SEQ ID NO: 5486 - DNA, 20 bp, Artificial Sequence
  Description of Artificial Sequence: Synthetic oligonucleotide
aagggattcgtttatcgagc

SEQ ID NO: 5487 - DNA, 22 bp, Artificial Sequence
  Description of Artificial Sequence: Synthetic oligonucleotide
taccgctcatcgtaactctaaa

SEQ ID NO: 5488 - DNA, 21 bp, Artificial Sequence
  Description of Artificial Sequence: Synthetic oligonucleotide
cggtagttgtaagtgcggatt

SEQ ID NO: 5489 - DNA, 29 bp, Artificial Sequence
  Description of Artificial Sequence: Synthetic oligonucleotide
tgacggcgatggtgattatggtcgttagg

SEQ ID NO: 5490 - DNA, 20 bp, Artificial Sequence
  Description of Artificial Sequence: Synthetic oligonucleotide
cacgaacgaaaccatctacg

SEQ ID NO: 5491 - DNA, 21 bp, Artificial Sequence
  Description of Artificial Sequence: Synthetic oligonucleotide
taaaccgcgaacaacaaaatc

SEQ ID NO: 5492 - DNA, 21 bp, Artificial Sequence
  Description of Artificial Sequence: Synthetic oligonucleotide
gacaacgacgaccacctattt

SEQ ID NO: 5493 - DNA, 22 bp, Artificial Sequence
  Description of Artificial Sequence: Synthetic oligonucleotide
gttttattacgggcgttacgtt

SEQ ID NO: 5494 - DNA, 20 bp, Artificial Sequence
  Description of Artificial Sequence: Synthetic oligonucleotide
cacgatcaaactcatcgacc

SEQ ID NO: 5495 - DNA, 21 bp, Artificial Sequence
  Description of Artificial Sequence: Synthetic oligonucleotide
gcgttttcgggtagttttatt

SEQ ID NO: 5496 - DNA, 20 bp, Artificial Sequence
  Description of Artificial Sequence: Synthetic oligonucleotide
tcgataaacgaatcccttcc

SEQ ID NO: 5497 - DNA, 21 bp, Artificial Sequence
  Description of Artificial Sequence: Synthetic oligonucleotide
ttagtgattcgtattagggcg

SEQ ID NO: 5498 - DNA, 20 bp, Artificial Sequence
  Description of Artificial Sequence: Synthetic oligonucleotide
tcatcatccgctcgataaac

SEQ ID NO: 5499 - DNA, 20 bp, Artificial Sequence
  Description of Artificial Sequence: Synthetic oligonucleotide
aaactacaaataccgcgcaa

SEQ ID NO: 5500 - DNA, 19 bp, Artificial Sequence
  Description of Artificial Sequence: Synthetic oligonucleotide
tattcgccaacgacaaaaa

SEQ ID NO: 5501 - DNA, 21 bp, Artificial Sequence
  Description of Artificial Sequence: Synthetic oligonucleotide
ctcatcatccgctcgataaac

SEQ ID NO: 5502 - DNA, 21 bp, Artificial Sequence
  Description of Artificial Sequence: Synthetic oligonucleotide
aaactcatcatccgctcgata

SEQ ID NO: 5503 - DNA, 20 bp, Artificial Sequence
  Description of Artificial Sequence: Synthetic oligonucleotide
ataactaaccgcccgctaaa

SEQ ID NO: 5504 - DNA, 20 bp, Artificial Sequence
  Description of Artificial Sequence: Synthetic oligonucleotide
aataactaaccgcccgctaa

SEQ ID NO: 5505 - DNA, 23 bp, Artificial Sequence
  Description of Artificial Sequence: Synthetic oligonucleotide
agggcgcgtatagtgtttattag

SEQ ID NO: 5506 - DNA, 19 bp, Artificial Sequence
  Description of Artificial Sequence: Synthetic oligonucleotide
atcgtactccccacgctac

SEQ ID NO: 5507 - DNA, 23 bp, Artificial Sequence
  Description of Artificial Sequence: Synthetic oligonucleotide
cgatgattattgtatttagcgga

SEQ ID NO: 5508 - DNA, 20 bp, Artificial Sequence
  Description of Artificial Sequence: Synthetic oligonucleotide
ttgtatttagcggagcgttt

SEQ ID NO: 5509 - DNA, 19 bp, Artificial Sequence
  Description of Artificial Sequence: Synthetic oligonucleotide
aaaccgcgaacaacaaaat

SEQ ID NO: 5510 - DNA, 21 bp, Artificial Sequence
  Description of Artificial Sequence: Synthetic oligonucleotide
acgtaacgcccgtaataaaac

SEQ ID NO: 5511 - DNA, 21 bp, Artificial Sequence
  Description of Artificial Sequence: Synthetic oligonucleotide
ttgtatttagcggagcgtttt

SEQ ID NO: 5512 - DNA, 22 bp, Artificial Sequence
  Description of Artificial Sequence: Synthetic oligonucleotide
gtaaataacaacgcgccaataa

SEQ ID NO: 5513 - DNA, 20 bp, Artificial Sequence
  Description of Artificial Sequence: Synthetic oligonucleotide
gtgagacgttcgttttcgtc

SEQ ID NO: 5514 - DNA, 49 bp, Artificial Sequence
  Description of Artificial Sequence: Synthetic oligonucleotide
tagggcgcgtatagtgtttattagatagtttaggttagcgttgcgcggt

SEQ ID NO: 5515 - DNA, 21 bp, Artificial Sequence
  Description of Artificial Sequence: Synthetic oligonucleotide
cgtaggtgagacgttcgtttt

SEQ ID NO: 5516 - DNA, 21 bp, Artificial Sequence
  Description of Artificial Sequence: Synthetic oligonucleotide
taaacgataacgaacctccac

SEQ ID NO: 5517 - DNA, 21 bp, Artificial Sequence
  Description of Artificial Sequence: Synthetic oligonucleotide
acaacgacgaccacctattta

SEQ ID NO: 5518 - DNA, 19 bp, Artificial Sequence
  Description of Artificial Sequence: Synthetic oligonucleotide
acgcgccaataatcgtact

SEQ ID NO: 5519 - DNA, 22 bp, Artificial Sequence
  Description of Artificial Sequence: Synthetic oligonucleotide
gatagtttaggttagcgttgcg

SEQ ID NO: 5520 - DNA, 26 bp, Artificial Sequence
  Description of Artificial Sequence: Synthetic oligonucleotide
tttcgcggtgtcgttttgtagcgtgg

SEQ ID NO: 5521 - DNA, 22 bp, Artificial Sequence
  Description of Artificial Sequence: Synthetic oligonucleotide
attgttatttttatcgtggcgt

SEQ ID NO: 5522 - DNA, 20 bp, Artificial Sequence
  Description of Artificial Sequence: Synthetic oligonucleotide
gattcgtttatcgagcggat

SEQ ID NO: 5523 - DNA, 32 bp, Artificial Sequence
  Description of Artificial Sequence: Synthetic oligonucleotide
agtcgttgtttagggcgcgtatagtgtttatt

SEQ ID NO: 5524 - DNA, 21 bp, Artificial Sequence
  Description of Artificial Sequence: Synthetic oligonucleotide
cgtaacgcccgtaataaaact

SEQ ID NO: 5525 - DNA, 20 bp, Artificial Sequence
  Description of Artificial Sequence: Synthetic oligonucleotide
acactatacgcgccctaaac

SEQ ID NO: 5526 - DNA, 22 bp, Artificial Sequence
  Description of Artificial Sequence: Synthetic oligonucleotide
taaaaataaccgaccacgacaa

SEQ ID NO: 5527 - DNA, 20 bp, Artificial Sequence
  Description of Artificial Sequence: Synthetic oligonucleotide
attacgggcgttacgttttt

SEQ ID NO: 5528 - DNA, 22 bp, Artificial Sequence
  Description of Artificial Sequence: Synthetic oligonucleotide
ccgctcatcgtaactctaaaca

SEQ ID NO: 5529 - DNA, 20 bp, Artificial Sequence
  Description of Artificial Sequence: Synthetic oligonucleotide
agagttttcgtttcgcgtta

SEQ ID NO: 5530 - DNA, 31 bp, Artificial Sequence
  Description of Artificial Sequence: Synthetic oligonucleotide
ggttacgttgtattcgttttgtgtttcgcgg

SEQ ID NO: 5531 - DNA, 22 bp, Artificial Sequence
  Description of Artificial Sequence: Synthetic oligonucleotide
cgcaacgctaacctaaactatc

SEQ ID NO: 5532 - DNA, 19 bp, Artificial Sequence
  Description of Artificial Sequence: Synthetic oligonucleotide
gttggacgggtcgatttta

SEQ ID NO: 5533 - DNA, 19 bp, Artificial Sequence
  Description of Artificial Sequence: Synthetic oligonucleotide
acgataacgaacctccacg

SEQ ID NO: 5534 - DNA, 21 bp, Artificial Sequence
  Description of Artificial Sequence: Synthetic oligonucleotide
taaataacaacgcgccaataa

SEQ ID NO: 5535 - DNA, 20 bp, Artificial Sequence
  Description of Artificial Sequence: Synthetic oligonucleotide
taatcgtactccccacgcta

SEQ ID NO: 5536 - DNA, 20 bp, Artificial Sequence
  Description of Artificial Sequence: Synthetic oligonucleotide
tctaaaccgcgaacaacaaa

SEQ ID NO: 5537 - DNA, 19 bp, Artificial Sequence
  Description of Artificial Sequence: Synthetic oligonucleotide
caaaatcaccatacgctcg

SEQ ID NO: 5538 - DNA, 23 bp, Artificial Sequence
  Description of Artificial Sequence: Synthetic oligonucleotide
ttattagttttattacgggcgtt

SEQ ID NO: 5539 - DNA, 22 bp, Artificial Sequence
  Description of Artificial Sequence: Synthetic oligonucleotide
tgagcggtagcgatatgtttta

SEQ ID NO: 5540 - DNA, 22 bp, Artificial Sequence
  Description of Artificial Sequence: Synthetic oligonucleotide
aacgtaacgcccgtaataaaac

SEQ ID NO: 5541 - DNA, 21 bp, Artificial Sequence
  Description of Artificial Sequence: Synthetic oligonucleotide
ttacgttgatttgtacggtgg

SEQ ID NO: 5542 - DNA, 20 bp, Artificial Sequence
  Description of Artificial Sequence: Synthetic oligonucleotide
ctacgccctacgctccttta

SEQ ID NO: 5543 - DNA, 20 bp, Artificial Sequence
  Description of Artificial Sequence: Synthetic oligonucleotide
attgtatttagcggagcgtt

SEQ ID NO: 5544 - DNA, 24 bp, Artificial Sequence
  Description of Artificial Sequence: Synthetic oligonucleotide
tatctaataaacactatacgcgcc

SEQ ID NO: 5545 - DNA, 19 bp, Artificial Sequence
  Description of Artificial Sequence: Synthetic oligonucleotide
tacgccctacgctccttta

SEQ ID NO: 5546 - DNA, 21 bp, Artificial Sequence
  Description of Artificial Sequence: Synthetic oligonucleotide
acactatacgcgccctaaaca

SEQ ID NO: 5547 - DNA, 29 bp, Artificial Sequence
  Description of Artificial Sequence: Synthetic oligonucleotide
ttcgtaggtgagacgttcgttttcgtcga

SEQ ID NO: 5548 - DNA, 22 bp, Artificial Sequence
  Description of Artificial Sequence: Synthetic oligonucleotide
cgttttcgtttagaattttgat

SEQ ID NO: 5549 - DNA, 20 bp, Artificial Sequence
  Description of Artificial Sequence: Synthetic oligonucleotide
cgaaaccatctacgccctac

SEQ ID NO: 5550 - DNA, 22 bp, Artificial Sequence
  Description of Artificial Sequence: Synthetic oligonucleotide
tctataaatcccacgaacgaaa

SEQ ID NO: 5551 - DNA, 19 bp, Artificial Sequence
  Description of Artificial Sequence: Synthetic oligonucleotide
gggcgttttcgagttttta

SEQ ID NO: 5552 - DNA, 22 bp, Artificial Sequence
  Description of Artificial Sequence: Synthetic oligonucleotide
taataaaaataaccgaccacga

SEQ ID NO: 5553 - DNA, 20 bp, Artificial Sequence
  Description of Artificial Sequence: Synthetic oligonucleotide
cgaacgtctcacctacgaaa

SEQ ID NO: 5554 - DNA, 22 bp, Artificial Sequence
  Description of Artificial Sequence: Synthetic oligonucleotide
gtagcgtttttcgagatgttta

SEQ ID NO: 5555 - DNA, 23 bp, Artificial Sequence
  Description of Artificial Sequence: Synthetic oligonucleotide
agtagcgtttttcgagatgttta

SEQ ID NO: 5556 - DNA, 22 bp, Artificial Sequence
  Description of Artificial Sequence: Synthetic oligonucleotide
tatttttatcgtggcgttgttt

SEQ ID NO: 5557 - DNA, 22 bp, Artificial Sequence
  Description of Artificial Sequence: Synthetic oligonucleotide
ttgttatttttatcgtggcgtt

SEQ ID NO: 5558 - DNA, 23 bp, Artificial Sequence
  Description of Artificial Sequence: Synthetic oligonucleotide
gtcgatggagaagagttttcgta

SEQ ID NO: 5559 - DNA, 20 bp, Artificial Sequence
  Description of Artificial Sequence: Synthetic oligonucleotide
acatatcgctaccgctcatc

SEQ ID NO: 5560 - DNA, 21 bp, Artificial Sequence
  Description of Artificial Sequence: Synthetic oligonucleotide
gttttcgcgtttgtatttgac

SEQ ID NO: 5561 - DNA, 20 bp, Artificial Sequence
  Description of Artificial Sequence: Synthetic oligonucleotide
aacgcgccaataatcgtact

SEQ ID NO: 5562 - DNA, 23 bp, Artificial Sequence
  Description of Artificial Sequence: Synthetic oligonucleotide
tcggttagtgattcgtattaggg

SEQ ID NO: 5563 - DNA, 21 bp, Artificial Sequence
  Description of Artificial Sequence: Synthetic oligonucleotide
gagagttttcgtttcgcgtta

SEQ ID NO: 5564 - DNA, 20 bp, Artificial Sequence
  Description of Artificial Sequence: Synthetic oligonucleotide
tgtatttagcggagcgtttt

SEQ ID NO: 5565 - DNA, 20 bp, Artificial Sequence
  Description of Artificial Sequence: Synthetic oligonucleotide
cgtcgaagtcgttgtttagg

SEQ ID NO: 5566 - DNA, 20 bp, Artificial Sequence
  Description of Artificial Sequence: Synthetic oligonucleotide
ataaccgaccacgacaaacc

SEQ ID NO: 5567 - DNA, 21 bp, Artificial Sequence
  Description of Artificial Sequence: Synthetic oligonucleotide
tatgacgtttatggcgttttt

SEQ ID NO: 5568 - DNA, 21 bp, Artificial Sequence
  Description of Artificial Sequence: Synthetic oligonucleotide
tttatgacgtttatggcgttt

SEQ ID NO: 5569 - DNA, 20 bp, Artificial Sequence
  Description of Artificial Sequence: Synthetic oligonucleotide
gaaactacaaataccgcgca

SEQ ID NO: 5570 - DNA, 20 bp, Artificial Sequence
  Description of Artificial Sequence: Synthetic oligonucleotide
tttatcgagcggatgatgag

SEQ ID NO: 5571 - DNA, 21 bp, Artificial Sequence
  Description of Artificial Sequence: Synthetic oligonucleotide
ttattacgggcgttacgtttt

SEQ ID NO: 5572 - DNA, 20 bp, Artificial Sequence
  Description of Artificial Sequence: Synthetic oligonucleotide
cactatacgcgccctaaaca

SEQ ID NO: 5573 - DNA, 21 bp, Artificial Sequence
  Description of Artificial Sequence: Synthetic oligonucleotide
gctaccgctcatcgtaactct

SEQ ID NO: 5574 - DNA, 21 bp, Artificial Sequence
  Description of Artificial Sequence: Synthetic oligonucleotide
tgttttcgcgtttgtatttga

SEQ ID NO: 5575 - DNA, 21 bp, Artificial Sequence
  Description of Artificial Sequence: Synthetic oligonucleotide
aacgtaacgcccgtaataaaa

SEQ ID NO: 5576 - DNA, 20 bp, Artificial Sequence
  Description of Artificial Sequence: Synthetic oligonucleotide
tatcgagcggatgatgagtt

SEQ ID NO: 5577 - DNA, 21 bp, Artificial Sequence
  Description of Artificial Sequence: Synthetic oligonucleotide
aaacgtaacgcccgtaataaa

SEQ ID NO: 5578 - DNA, 21 bp, Artificial Sequence
  Description of Artificial Sequence: Synthetic oligonucleotide
aaaacgtaacgcccgtaataa

SEQ ID NO: 5579 - DNA, 19 bp, Artificial Sequence
  Description of Artificial Sequence: Synthetic oligonucleotide
aaccgcgaacaacaaaatc

SEQ ID NO: 5580 - DNA, 21 bp, Artificial Sequence
  Description of Artificial Sequence: Synthetic oligonucleotide
aacaacgccacgataaaaata

SEQ ID NO: 5581 - DNA, 19 bp, Artificial Sequence
  Description of Artificial Sequence: Synthetic oligonucleotide
ctaaaccgcgaacaacaaa

SEQ ID NO: 5582 - DNA, 22 bp, Artificial Sequence
  Description of Artificial Sequence: Synthetic oligonucleotide
acaatatcgaatcctaaacgaa

SEQ ID NO: 5583 - DNA, 21 bp, Artificial Sequence
  Description of Artificial Sequence: Synthetic oligonucleotide
gggcggttagttattatcgtg

SEQ ID NO: 5584 - DNA, 42 bp, Artificial Sequence
  Description of Artificial Sequence: Synthetic oligonucleotide
gtcgtagttttttttaagtttgaaggggacggaattttcggg

SEQ ID NO: 5585 - DNA, 21 bp, Artificial Sequence
  Description of Artificial Sequence: Synthetic oligonucleotide
attattgtatttagcggagcg

SEQ ID NO: 5586 - DNA, 21 bp, Artificial Sequence
  Description of Artificial Sequence: Synthetic oligonucleotide
attaagtaggatggcgtttcg

SEQ ID NO: 5587 - DNA, 22 bp, Artificial Sequence
  Description of Artificial Sequence: Synthetic oligonucleotide
tattagttttattacgggcgtt

SEQ ID NO: 5588 - DNA, 23 bp, Artificial Sequence
  Description of Artificial Sequence: Synthetic oligonucleotide
tcgacgacgtatctatctacacc

SEQ ID NO: 5589 - DNA, 21 bp, Artificial Sequence
  Description of Artificial Sequence: Synthetic oligonucleotide
gggcgttttcgagtttttagt

SEQ ID NO: 5590 - DNA, 29 bp, Artificial Sequence
  Description of Artificial Sequence: Synthetic oligonucleotide
aagttaaaggagcgtagggcgtagatggt

SEQ ID NO: 5591 - DNA, 19 bp, Artificial Sequence
  Description of Artificial Sequence: Synthetic oligonucleotide
cgtagggcgtagatggttt

SEQ ID NO: 5592 - DNA, 22 bp, Artificial Sequence
  Description of Artificial Sequence: Synthetic oligonucleotide
tttacgttgatttgtacggtgg

SEQ ID NO: 5593 - DNA, 21 bp, Artificial Sequence
  Description of Artificial Sequence: Synthetic oligonucleotide
aacatatcgctaccgctcatc

SEQ ID NO: 5594 - DNA, 22 bp, Artificial Sequence
  Description of Artificial Sequence: Synthetic oligonucleotide
ttgtcgtggtcggttattttta

SEQ ID NO: 5595 - DNA, 20 bp, Artificial Sequence
  Description of Artificial Sequence: Synthetic oligonucleotide
aacgataacgaacctccacg

SEQ ID NO: 5596 - DNA, 20 bp, Artificial Sequence
  Description of Artificial Sequence: Synthetic oligonucleotide
gctaccgctcatcgtaactc

SEQ ID NO: 5597 - DNA, 20 bp, Artificial Sequence
  Description of Artificial Sequence: Synthetic oligonucleotide
ggaggagagttttcgtttcg

SEQ ID NO: 5598 - DNA, 20 bp, Artificial Sequence
  Description of Artificial Sequence: Synthetic oligonucleotide
aaacatatcgctaccgctca

SEQ ID NO: 5599 - DNA, 23 bp, Artificial Sequence
  Description of Artificial Sequence: Synthetic oligonucleotide
gcgttttcgagtttttagtaagt

SEQ ID NO: 5600 - DNA, 20 bp, Artificial Sequence
  Description of Artificial Sequence: Synthetic oligonucleotide
aaaaactctaaaccgcgaac

SEQ ID NO: 5601 - DNA, 20 bp, Artificial Sequence
  Description of Artificial Sequence: Synthetic oligonucleotide
ccctaaacaacgacttcgac

SEQ ID NO: 5602 - DNA, 22 bp, Artificial Sequence
  Description of Artificial Sequence: Synthetic oligonucleotide
tttattacgggcgttacgtttt

SEQ ID NO: 5603 - DNA, 19 bp, Artificial Sequence
  Description of Artificial Sequence: Synthetic oligonucleotide
atctacgccctacgctcct

SEQ ID NO: 5604 - DNA, 19 bp, Artificial Sequence
  Description of Artificial Sequence: Synthetic oligonucleotide
taactaaccgcccgctaaa

SEQ ID NO: 5605 - DNA, 22 bp, Artificial Sequence
  Description of Artificial Sequence: Synthetic oligonucleotide
aaaaacgtaacgcccgtaataa

SEQ ID NO: 5606 - DNA, 22 bp, Artificial Sequence
  Description of Artificial Sequence: Synthetic oligonucleotide
gcgcgttgttatttacgtttag

SEQ ID NO: 5607 - DNA, 33 bp, Artificial Sequence
  Description of Artificial Sequence: Synthetic oligonucleotide
ggcgttgttttttaagtgcgcgggcgttttcga

SEQ ID NO: 5608 - DNA, 22 bp, Artificial Sequence
  Description of Artificial Sequence: Synthetic oligonucleotide
aatcacgatcaaactcatcgac

SEQ ID NO: 5609 - DNA, 19 bp, Artificial Sequence
  Description of Artificial Sequence: Synthetic oligonucleotide
cggtttcgtttagcgtttt

SEQ ID NO: 5610 - DNA, 27 bp, Artificial Sequence
  Description of Artificial Sequence: Synthetic oligonucleotide
tacggagacgaaatcgatggacggcgt

SEQ ID NO: 5611 - DNA, 19 bp, Artificial Sequence
  Description of Artificial Sequence: Synthetic oligonucleotide
attcgtttatcgagcggat

SEQ ID NO: 5612 - DNA, 19 bp, Artificial Sequence
  Description of Artificial Sequence: Synthetic oligonucleotide
gtagtttcgcggtgtcgtt

SEQ ID NO: 5613 - DNA, 28 bp, Artificial Sequence
  Description of Artificial Sequence: Synthetic oligonucleotide
agcgtggggagtacgattattggcgcgt

SEQ ID NO: 5614 - DNA, 22 bp, Artificial Sequence
  Description of Artificial Sequence: Synthetic oligonucleotide
acgctcgtactaactaccctaa

SEQ ID NO: 5615 - DNA, 20 bp, Artificial Sequence
  Description of Artificial Sequence: Synthetic oligonucleotide
gcgcaacgctaacctaaact

SEQ ID NO: 5616 - DNA, 19 bp, Artificial Sequence
  Description of Artificial Sequence: Synthetic oligonucleotide
cgcacttacaactaccgca

SEQ ID NO: 5617 - DNA, 33 bp, Artificial Sequence
  Description of Artificial Sequence: Synthetic oligonucleotide
tgtttttatttagttgcgggtggttgtattcgg

SEQ ID NO: 5618 - DNA, 22 bp, Artificial Sequence
  Description of Artificial Sequence: Synthetic oligonucleotide
ttatttttatcgtggcgttgtt

SEQ ID NO: 5619 - DNA, 18 bp, Artificial Sequence
  Description of Artificial Sequence: Synthetic oligonucleotide
gacgccgataaaaatccc

SEQ ID NO: 5620 - DNA, 22 bp, Artificial Sequence
  Description of Artificial Sequence: Synthetic oligonucleotide
tatacggattaggtcggttttg

SEQ ID NO: 5621 - DNA, 32 bp, Artificial Sequence
  Description of Artificial Sequence: Synthetic oligonucleotide
gtacgcggttaggtacgtagttgttgaaagag

SEQ ID NO: 5622 - DNA, 20 bp, Artificial Sequence
  Description of Artificial Sequence: Synthetic oligonucleotide
ccctaaacgataacgaacct

SEQ ID NO: 5623 - DNA, 22 bp, Artificial Sequence
  Description of Artificial Sequence: Synthetic oligonucleotide
attattggcgcgttgttattta

SEQ ID NO: 5624 - DNA, 23 bp, Artificial Sequence
  Description of Artificial Sequence: Synthetic oligonucleotide
cgacgacgtatctatctacacct

SEQ ID NO: 5625 - DNA, 21 bp, Artificial Sequence
  Description of Artificial Sequence: Synthetic oligonucleotide
caacgccacgataaaaataac

SEQ ID NO: 5626 - DNA, 22 bp, Artificial Sequence
  Description of Artificial Sequence: Synthetic oligonucleotide
atttttacgttgatttgtacgg

SEQ ID NO: 5627 - DNA, 23 bp, Artificial Sequence
  Description of Artificial Sequence: Synthetic oligonucleotide
tttttacgttgatttgtacggtg

SEQ ID NO: 5628 - DNA, 20 bp, Artificial Sequence
  Description of Artificial Sequence: Synthetic oligonucleotide
taaacgataacgaacctcca

SEQ ID NO: 5629 - DNA, 21 bp, Artificial Sequence
  Description of Artificial Sequence: Synthetic oligonucleotide
cgacctaaaccaaaacgacac

SEQ ID NO: 5630 - DNA, 21 bp, Artificial Sequence
  Description of Artificial Sequence: Synthetic oligonucleotide
tttatttcgatttggttcgag

SEQ ID NO: 5631 - DNA, 24 bp, Artificial Sequence
  Description of Artificial Sequence: Synthetic oligonucleotide
aggagggcgcgttgtcgttgatgt

SEQ ID NO: 5632 - DNA, 22 bp, Artificial Sequence
  Description of Artificial Sequence: Synthetic oligonucleotide
tattgttatttttatcgtggcg

SEQ ID NO: 5633 - DNA, 19 bp, Artificial Sequence
  Description of Artificial Sequence: Synthetic oligonucleotide
gacgacgacaccaaattcc

SEQ ID NO: 5634 - DNA, 23 bp, Artificial Sequence
  Description of Artificial Sequence: Synthetic oligonucleotide
aaccgacctaatccgtataaaaa

SEQ ID NO: 5635 - DNA, 20 bp, Artificial Sequence
  Description of Artificial Sequence: Synthetic oligonucleotide
ggtcgatgagtttgatcgtg

SEQ ID NO: 5636 - DNA, 37 bp, Artificial Sequence
  Description of Artificial Sequence: Synthetic oligonucleotide
aggtttcgggtttgtacgttaatttttagtatttcgt

SEQ ID NO: 5637 - DNA, 23 bp, Artificial Sequence
  Description of Artificial Sequence: Synthetic oligonucleotide
aaaaccgacctaatccgtataaa

SEQ ID NO: 5638 - DNA, 19 bp, Artificial Sequence
  Description of Artificial Sequence: Synthetic oligonucleotide
aaaccatctacgccctacg

SEQ ID NO: 5639 - DNA, 22 bp, Artificial Sequence
  Description of Artificial Sequence: Synthetic oligonucleotide
cgccctaatacgaatcactaac

SEQ ID NO: 5640 - DNA, 18 bp, Artificial Sequence
  Description of Artificial Sequence: Synthetic oligonucleotide
gacggaattttcgggttc

SEQ ID NO: 5641 - DNA, 39 bp, Artificial Sequence
  Description of Artificial Sequence: Synthetic oligonucleotide
aggattcgatattgtagttgttcgtttttgttagagttt

SEQ ID NO: 5642 - DNA, 21 bp, Artificial Sequence
  Description of Artificial Sequence: Synthetic oligonucleotide
ttatttcgatttggttcgagg

SEQ ID NO: 5643 - DNA, 22 bp, Artificial Sequence
  Description of Artificial Sequence: Synthetic oligonucleotide
accgacctaatccgtataaaaa

SEQ ID NO: 5644 - DNA, 22 bp, Artificial Sequence
  Description of Artificial Sequence: Synthetic oligonucleotide
aaaccgacctaatccgtataaa

SEQ ID NO: 5645 - DNA, 19 bp, Artificial Sequence
  Description of Artificial Sequence: Synthetic oligonucleotide
ataaacgaatcccttcccg

SEQ ID NO: 5646 - DNA, 19 bp, Artificial Sequence
  Description of Artificial Sequence: Synthetic oligonucleotide
ttacgggcgttacgttttt

SEQ ID NO: 5647 - DNA, 25 bp, Artificial Sequence
  Description of Artificial Sequence: Synthetic oligonucleotide
ctatctaataaacactatacgcgcc

SEQ ID NO: 5648 - DNA, 18 bp, Artificial Sequence
  Description of Artificial Sequence: Synthetic oligonucleotide
cgtactccccacgctaca

SEQ ID NO: 5649 - DNA, 19 bp, Artificial Sequence
  Description of Artificial Sequence: Synthetic oligonucleotide
tccgcacttacaactaccg

SEQ ID NO: 5650 - DNA, 19 bp, Artificial Sequence
  Description of Artificial Sequence: Synthetic oligonucleotide
acgacaacaacccgatctt

SEQ ID NO: 5651 - DNA, 18 bp, Artificial Sequence
  Description of Artificial Sequence: Synthetic oligonucleotide
gtgtagcgtgcggatttc

SEQ ID NO: 5652 - DNA, 18 bp, Artificial Sequence
  Description of Artificial Sequence: Synthetic oligonucleotide
tcgaagatcgggttgttg

SEQ ID NO: 5653 - DNA, 34 bp, Artificial Sequence
  Description of Artificial Sequence: Synthetic oligonucleotide
aattatttttacgttgatttgtacggtggcggaa

SEQ ID NO: 5654 - DNA, 22 bp, Artificial Sequence
  Description of Artificial Sequence: Synthetic oligonucleotide
atcgccctaatacgaatcacta

SEQ ID NO: 5655 - DNA, 38 bp, Artificial Sequence
  Description of Artificial Sequence: Synthetic oligonucleotide
ttcgatattgtagttgttcgtttttgttagagtttcgg

SEQ ID NO: 5656 - DNA, 24 bp, Artificial Sequence
  Description of Artificial Sequence: Synthetic oligonucleotide
attattagttttattacgggcgtt

SEQ ID NO: 5657 - DNA, 22 bp, Artificial Sequence
  Description of Artificial Sequence: Synthetic oligonucleotide
cgatggtgattatggtcgttag

SEQ ID NO: 5658 - DNA, 45 bp, Artificial Sequence
  Description of Artificial Sequence: Synthetic oligonucleotide
agcggtagcgatatgttttagtggtgttgttcgttatttattcgt

SEQ ID NO: 5659 - DNA, 20 bp, Artificial Sequence
  Description of Artificial Sequence: Synthetic oligonucleotide
ttaagtaggatggcgtttcg

SEQ ID NO: 5660 - DNA, 21 bp, Artificial Sequence
  Description of Artificial Sequence: Synthetic oligonucleotide
ttttattacgggcgttacgtt

SEQ ID NO: 5661 - DNA, 20 bp, Artificial Sequence
  Description of Artificial Sequence: Synthetic oligonucleotide
atgcggtagttgtaagtgcg

SEQ ID NO: 5662 - DNA, 20 bp, Artificial Sequence
  Description of Artificial Sequence: Synthetic oligonucleotide
ataataactaaccgcccgct

SEQ ID NO: 5663 - DNA, 21 bp, Artificial Sequence
  Description of Artificial Sequence: Synthetic oligonucleotide
gggttgtcgttttcgtttaga

SEQ ID NO: 5664 - DNA, 19 bp, Artificial Sequence
  Description of Artificial Sequence: Synthetic oligonucleotide
aaaacgctaaacgaaaccg

SEQ ID NO: 5665 - DNA, 23 bp, Artificial Sequence
  Description of Artificial Sequence: Synthetic oligonucleotide
ggattcgatattgtagttgttcg

SEQ ID NO: 5666 - DNA, 32 bp, Artificial Sequence
  Description of Artificial Sequence: Synthetic oligonucleotide
gtttcggttagtgattcgtattagggcgatga

SEQ ID NO: 5667 - DNA, 22 bp, Artificial Sequence
  Description of Artificial Sequence: Synthetic oligonucleotide
gtcgtttacgtcgtgatattga

SEQ ID NO: 5668 - DNA, 22 bp, Artificial Sequence
  Description of Artificial Sequence: Synthetic oligonucleotide
cgaatcttcaactaccgattct

SEQ ID NO: 5669 - DNA, 29 bp, Artificial Sequence
  Description of Artificial Sequence: Synthetic oligonucleotide
aggagagtagtagtcgtgcggggtttttt

SEQ ID NO: 5670 - DNA, 22 bp, Artificial Sequence
  Description of Artificial Sequence: Synthetic oligonucleotide
tcgtttacgtcgtgatattgat

SEQ ID NO: 5671 - DNA, 21 bp, Artificial Sequence
  Description of Artificial Sequence: Synthetic oligonucleotide
ccgaatcttcaactaccgatt

SEQ ID NO: 5672 - DNA, 22 bp, Artificial Sequence
  Description of Artificial Sequence: Synthetic oligonucleotide
agtcgtttacgtcgtgatattg

SEQ ID NO: 5673 - DNA, 22 bp, Artificial Sequence
  Description of Artificial Sequence: Synthetic oligonucleotide
agaatcggtagttgaagattcg

SEQ ID NO: 5674 - DNA, 22 bp, Artificial Sequence
  Description of Artificial Sequence: Synthetic oligonucleotide
gcccgtaaacgataacaaaaat

SEQ ID NO: 5675 - DNA, 34 bp, Artificial Sequence
  Description of Artificial Sequence: Synthetic oligonucleotide
ggcgatttttgagacggatggtgtatagttgcgg

SEQ ID NO: 5676 - DNA, 23 bp, Artificial Sequence
  Description of Artificial Sequence: Synthetic oligonucleotide
gagtcgtttacgtcgtgatattg

SEQ ID NO: 5677 - DNA, 22 bp, Artificial Sequence
  Description of Artificial Sequence: Synthetic oligonucleotide
cccgtaaacgataacaaaaata

SEQ ID NO: 5678 - DNA, 21 bp, Artificial Sequence
  Description of Artificial Sequence: Synthetic oligonucleotide
aatcggtagttgaagattcgg

SEQ ID NO: 5679 - DNA, 23 bp, Artificial Sequence
  Description of Artificial Sequence: Synthetic oligonucleotide
tagaatcggtagttgaagattcg

SEQ ID NO: 5680 - DNA, 21 bp, Artificial Sequence
  Description of Artificial Sequence: Synthetic oligonucleotide
tacccgaatcttcaactaccg

SEQ ID NO: 5681 - DNA, 23 bp, Artificial Sequence
  Description of Artificial Sequence: Synthetic oligonucleotide
ggagtcgtttacgtcgtgatatt

SEQ ID NO: 5682 - DNA, 23 bp, Artificial Sequence
  Description of Artificial Sequence: Synthetic oligonucleotide
gtcgtttacgtcgtgatattgat

SEQ ID NO: 5683 - DNA, 21 bp, Artificial Sequence
  Description of Artificial Sequence: Synthetic oligonucleotide
gtgtatagttgcggacgtttg

SEQ ID NO: 5684 - DNA, 21 bp, Artificial Sequence
  Description of Artificial Sequence: Synthetic oligonucleotide
gcccgtaaacgataacaaaaa

SEQ ID NO: 5685 - DNA, 26 bp, Artificial Sequence
  Description of Artificial Sequence: Synthetic oligonucleotide
tggaagtcgtcggatcggatgttggg

SEQ ID NO: 5686 - DNA, 22 bp, Artificial Sequence
  Description of Artificial Sequence: Synthetic oligonucleotide
gaatcggtagttgaagattcgg

SEQ ID NO: 5687 - DNA, 21 bp, Artificial Sequence
  Description of Artificial Sequence: Synthetic oligonucleotide
cggtagttgaagattcgggta

SEQ ID NO: 5688 - DNA, 20 bp, Artificial Sequence
  Description of Artificial Sequence: Synthetic oligonucleotide
gtatagttgcggacgtttgg

SEQ ID NO: 5689 - DNA, 25 bp, Artificial Sequence
  Description of Artificial Sequence: Synthetic oligonucleotide
cgattctaactactacaaccctacg

SEQ ID NO: 5690 - DNA, 22 bp, Artificial Sequence
  Description of Artificial Sequence: Synthetic oligonucleotide
attttatttcgcgtttttagcg

SEQ ID NO: 5691 - DNA, 20 bp, Artificial Sequence
  Description of Artificial Sequence: Synthetic oligonucleotide
cctaccaccaatacgacgac

SEQ ID NO: 5692 - DNA, 21 bp, Artificial Sequence
  Description of Artificial Sequence: Synthetic oligonucleotide
tggtggcgtttgggacgcggt

SEQ ID NO: 5693 - DNA, 20 bp, Artificial Sequence
  Description of Artificial Sequence: Synthetic oligonucleotide
acccgaatcttcaactaccg

SEQ ID NO: 5694 - DNA, 20 bp, Artificial Sequence
  Description of Artificial Sequence: Synthetic oligonucleotide
acggatggtgtatagttgcg

SEQ ID NO: 5695 - DNA, 27 bp, Artificial Sequence
  Description of Artificial Sequence: Synthetic oligonucleotide
tggaacggagtttggaagtcgtcggat

SEQ ID NO: 5696 - DNA, 19 bp, Artificial Sequence
  Description of Artificial Sequence: Synthetic oligonucleotide
cccgaatcttcaactaccg

SEQ ID NO: 5697 - DNA, 21 bp, Artificial Sequence
  Description of Artificial Sequence: Synthetic oligonucleotide
tttatttcgcgtttttagcgt

SEQ ID NO: 5698 - DNA, 21 bp, Artificial Sequence
  Description of Artificial Sequence: Synthetic oligonucleotide
ttatttcgcgtttttagcgtt

SEQ ID NO: 5699 - DNA, 21 bp, Artificial Sequence
  Description of Artificial Sequence: Synthetic oligonucleotide
cgtttacgtcgtgatattgat

SEQ ID NO: 5700 - DNA, 24 bp, Artificial Sequence
  Description of Artificial Sequence: Synthetic oligonucleotide
ttagaatcggtagttgaagattcg

SEQ ID NO: 5701 - DNA, 21 bp, Artificial Sequence
  Description of Artificial Sequence: Synthetic oligonucleotide
atcgccgaatcgaatactaaa

SEQ ID NO: 5702 - DNA, 22 bp, Artificial Sequence
  Description of Artificial Sequence: Synthetic oligonucleotide
aattagggtagttgtcgtcgtt

SEQ ID NO: 5703 - DNA, 30 bp, Artificial Sequence
  Description of Artificial Sequence: Synthetic oligonucleotide
gtcgttcgtgagcgatgataggagtgtttg

SEQ ID NO: 5704 - DNA, 22 bp, Artificial Sequence
  Description of Artificial Sequence: Synthetic oligonucleotide
ctcgaacaaaattaacgattcc

SEQ ID NO: 5705 - DNA, 22 bp, Artificial Sequence
  Description of Artificial Sequence: Synthetic oligonucleotide
agtaaggatagtcgttgtcgtc

SEQ ID NO: 5706 - DNA, 37 bp, Artificial Sequence
  Description of Artificial Sequence: Synthetic oligonucleotide
agtattcgattcggcgatttttaagtttcgttttaga

SEQ ID NO: 5707 - DNA, 21 bp, Artificial Sequence
  Description of Artificial Sequence: Synthetic oligonucleotide
gttcgtgagcgatgataggag

SEQ ID NO: 5708 - DNA, 22 bp, Artificial Sequence
  Description of Artificial Sequence: Synthetic oligonucleotide
aatcgccgaatcgaatactaaa

SEQ ID NO: 5709 - DNA, 20 bp, Artificial Sequence
  Description of Artificial Sequence: Synthetic oligonucleotide
cgccgaatcgaatactaaaa

SEQ ID NO: 5710 - DNA, 20 bp, Artificial Sequence
  Description of Artificial Sequence: Synthetic oligonucleotide
ttcgtgagcgatgataggag

SEQ ID NO: 5711 - DNA, 20 bp, Artificial Sequence
  Description of Artificial Sequence: Synthetic oligonucleotide
tcgccgaatcgaatactaaa

SEQ ID NO: 5712 - DNA, 20 bp, Artificial Sequence
  Description of Artificial Sequence: Synthetic oligonucleotide
cgtgagcgatgataggagtg

SEQ ID NO: 5713 - DNA, 21 bp, Artificial Sequence
  Description of Artificial Sequence: Synthetic oligonucleotide
taaaaatcgccgaatcgaata

SEQ ID NO: 5714 - DNA, 20 bp, Artificial Sequence
  Description of Artificial Sequence: Synthetic oligonucleotide
cgttcacgccgtaatactaa

SEQ ID NO: 5715 - DNA, 22 bp, Artificial Sequence
  Description of Artificial Sequence: Synthetic oligonucleotide
ggaatcgttaattttgttcgag

SEQ ID NO: 5716 - DNA, 40 bp, Artificial Sequence
  Description of Artificial Sequence: Synthetic oligonucleotide
atcgattttgattattatagttttacggggggagtttcgt

SEQ ID NO: 5717 - DNA, 19 bp, Artificial Sequence
  Description of Artificial Sequence: Synthetic oligonucleotide
acacccgcaccgtactaac

SEQ ID NO: 5718 - DNA, 22 bp, Artificial Sequence
  Description of Artificial Sequence: Synthetic oligonucleotide
cgtttgcgtaataaagagaagg

SEQ ID NO: 5719 - DNA, 24 bp, Artificial Sequence
  Description of Artificial Sequence: Synthetic oligonucleotide
agcgtgttgggttggtgcgagtgg

SEQ ID NO: 5720 - DNA, 19 bp, Artificial Sequence
  Description of Artificial Sequence: Synthetic oligonucleotide
tcgtgagcgatgataggag

SEQ ID NO: 5721 - DNA, 20 bp, Artificial Sequence
  Description of Artificial Sequence: Synthetic oligonucleotide
aaatcgccgaatcgaatact

SEQ ID NO: 5722 - DNA, 22 bp, Artificial Sequence
  Description of Artificial Sequence: Synthetic oligonucleotide
gcgtttgcgtaataaagagaag

SEQ ID NO: 5723 - DNA, 19 bp, Artificial Sequence
  Description of Artificial Sequence: Synthetic oligonucleotide
cacccgcaccgtactaact

SEQ ID NO: 5724 - DNA, 22 bp, Artificial Sequence
  Description of Artificial Sequence: Synthetic oligonucleotide
cgaacgtctaaaacgaaactta

SEQ ID NO: 5725 - DNA, 20 bp, Artificial Sequence
  Description of Artificial Sequence: Synthetic oligonucleotide
tcgtgagcgatgataggagt

SEQ ID NO: 5726 - DNA, 36 bp, Artificial Sequence
  Description of Artificial Sequence: Synthetic oligonucleotide
tgatagaagggtttttagtattcgattcggcgattt

SEQ ID NO: 5727 - DNA, 21 bp, Artificial Sequence
  Description of Artificial Sequence: Synthetic oligonucleotide
aaaatcgccgaatcgaatact

SEQ ID NO: 5728 - DNA, 20 bp, Artificial Sequence
  Description of Artificial Sequence: Synthetic oligonucleotide
aacacccgcaccgtactaac

SEQ ID NO: 5729 - DNA, 22 bp, Artificial Sequence
  Description of Artificial Sequence: Synthetic oligonucleotide
ttagggtagttgtcgtcgttat

SEQ ID NO: 5730 - DNA, 22 bp, Artificial Sequence
  Description of Artificial Sequence: Synthetic oligonucleotide
attagggtagttgtcgtcgtta

SEQ ID NO: 5731 - DNA, 20 bp, Artificial Sequence
  Description of Artificial Sequence: Synthetic oligonucleotide
gttcgtgagcgatgatagga

SEQ ID NO: 5732 - DNA, 21 bp, Artificial Sequence
  Description of Artificial Sequence: Synthetic oligonucleotide
ttcgtgagcgatgataggagt

SEQ ID NO: 5733 - DNA, 22 bp, Artificial Sequence
  Description of Artificial Sequence: Synthetic oligonucleotide
ctacgaacgtctaaaacgaaac

SEQ ID NO: 5734 - DNA, 23 bp, Artificial Sequence
  Description of Artificial Sequence: Synthetic oligonucleotide
actcgaacaaaattaacgattcc

SEQ ID NO: 5735 - DNA, 23 bp, Artificial Sequence
  Description of Artificial Sequence: Synthetic oligonucleotide
acgaacgtctaaaacgaaactta

SEQ ID NO: 5736 - DNA, 19 bp, Artificial Sequence
  Description of Artificial Sequence: Synthetic oligonucleotide
ctactcccttctaccgcgt

SEQ ID NO: 5737 - DNA, 22 bp, Artificial Sequence
  Description of Artificial Sequence: Synthetic oligonucleotide
gatatagggcgattaggacgtt

SEQ ID NO: 5738 - DNA, 28 bp, Artificial Sequence
  Description of Artificial Sequence: Synthetic oligonucleotide
tgggggttatagcggtttacggtagtgg

SEQ ID NO: 5739 - DNA, 23 bp, Artificial Sequence
  Description of Artificial Sequence: Synthetic oligonucleotide
aaaaactcgaacaaaattaacga

SEQ ID NO: 5740 - DNA, 22 bp, Artificial Sequence
  Description of Artificial Sequence: Synthetic oligonucleotide
aaaaactcgaacaaaattaacg

SEQ ID NO: 5741 - DNA, 22 bp, Artificial Sequence
  Description of Artificial Sequence: Synthetic oligonucleotide
aaaactcgaacaaaattaacga

SEQ ID NO: 5742 - DNA, 21 bp, Artificial Sequence
  Description of Artificial Sequence: Synthetic oligonucleotide
tcgaacaaaattaacgattcc

SEQ ID NO: 5743 - DNA, 22 bp, Artificial Sequence
  Description of Artificial Sequence: Synthetic oligonucleotide
tacgaacgtctaaaacgaaact

SEQ ID NO: 5744 - DNA, 21 bp, Artificial Sequence
  Description of Artificial Sequence: Synthetic oligonucleotide
ggttagacgacgagtagggtc

SEQ ID NO: 5745 - DNA, 22 bp, Artificial Sequence
  Description of Artificial Sequence: Synthetic oligonucleotide
caacacgaacgtataaaaacga

SEQ ID NO: 5746 - DNA, 26 bp, Artificial Sequence
  Description of Artificial Sequence: Synthetic oligonucleotide
gttcgaggttttttggtggcgcgcga

SEQ ID NO: 5747 - DNA, 21 bp, Artificial Sequence
  Description of Artificial Sequence: Synthetic oligonucleotide
ttttcgttgagatggataacg

SEQ ID NO: 5748 - DNA, 22 bp, Artificial Sequence
  Description of Artificial Sequence: Synthetic oligonucleotide
caccgcgtaaacaactaataca

SEQ ID NO: 5749 - DNA, 38 bp, Artificial Sequence
  Description of Artificial Sequence: Synthetic oligonucleotide
ttcggcgttgagttgttttaacgcgtcgattttggcgt

SEQ ID NO: 5750 - DNA, 22 bp, Artificial Sequence
  Description of Artificial Sequence: Synthetic oligonucleotide
cggttgcgttatttttgtattt

SEQ ID NO: 5751 - DNA, 22 bp, Artificial Sequence
  Description of Artificial Sequence: Synthetic oligonucleotide
ctaccgactaaatatccgcctc

SEQ ID NO: 5752 - DNA, 20 bp, Artificial Sequence
  Description of Artificial Sequence: Synthetic oligonucleotide
ggcggggacgcgagttgcgg

SEQ ID NO: 5753 - DNA, 21 bp, Artificial Sequence
  Description of Artificial Sequence: Synthetic oligonucleotide
ttcggaaaaattagagaacgg

SEQ ID NO: 5754 - DNA, 22 bp, Artificial Sequence
  Description of Artificial Sequence: Synthetic oligonucleotide
cgaaactcaacgatcctaaaac

SEQ ID NO: 5755 - DNA, 27 bp, Artificial Sequence
  Description of Artificial Sequence: Synthetic oligonucleotide
gagcgttcgcgagtaggttcgtgtaga

SEQ ID NO: 5756 - DNA, 22 bp, Artificial Sequence
  Description of Artificial Sequence: Synthetic oligonucleotide
acgaaactcaacgatcctaaaa

SEQ ID NO: 5757 - DNA, 28 bp, Artificial Sequence
  Description of Artificial Sequence: Synthetic oligonucleotide
ttcgcgagtaggttcgtgtagaatcggg

SEQ ID NO: 5758 - DNA, 21 bp, Artificial Sequence
  Description of Artificial Sequence: Synthetic oligonucleotide
taccgactaaatatccgcctc

SEQ ID NO: 5759 - DNA, 22 bp, Artificial Sequence
  Description of Artificial Sequence: Synthetic oligonucleotide
gtagaatcgggttttaggatcg

SEQ ID NO: 5760 - DNA, 22 bp, Artificial Sequence
  Description of Artificial Sequence: Synthetic oligonucleotide
acgttatccatctcaacgaaaa

SEQ ID NO: 5761 - DNA, 29 bp, Artificial Sequence
  Description of Artificial Sequence: Synthetic oligonucleotide
ggcgtttttgggggacgttaggtcgtcgg

SEQ ID NO: 5762 - DNA, 21 bp, Artificial Sequence
  Description of Artificial Sequence: Synthetic oligonucleotide
tagaatcgggttttaggatcg

SEQ ID NO: 5763 - DNA, 21 bp, Artificial Sequence
  Description of Artificial Sequence: Synthetic oligonucleotide
ggtcggtcgtatttatagcgt

SEQ ID NO: 5764 - DNA, 22 bp, Artificial Sequence
  Description of Artificial Sequence: Synthetic oligonucleotide
tcgtctaaccgaacgaaaacta

SEQ ID NO: 5765 - DNA, 26 bp, Artificial Sequence
  Description of Artificial Sequence: Synthetic oligonucleotide
gtgagtttggtcgtgtgggggatcgt

SEQ ID NO: 5766 - DNA, 21 bp, Artificial Sequence
  Description of Artificial Sequence: Synthetic oligonucleotide
cgttatccatctcaacgaaaa

SEQ ID NO: 5767 - DNA, 20 bp, Artificial Sequence
  Description of Artificial Sequence: Synthetic oligonucleotide
accgactaaatatccgcctc

SEQ ID NO: 5768 - DNA, 21 bp, Artificial Sequence
  Description of Artificial Sequence: Synthetic oligonucleotide
gaccctactcgtcgtctaacc

SEQ ID NO: 5769 - DNA, 23 bp, Artificial Sequence
  Description of Artificial Sequence: Synthetic oligonucleotide
tacgaaactcaacgatcctaaaa

SEQ ID NO: 5770 - DNA, 21 bp, Artificial Sequence
  Description of Artificial Sequence: Synthetic oligonucleotide
tttttagtttcgtgagttcgc

SEQ ID NO: 5771 - DNA, 22 bp, Artificial Sequence
  Description of Artificial Sequence: Synthetic oligonucleotide
aaaccgttctctaatttttccg

SEQ ID NO: 5772 - DNA, 29 bp, Artificial Sequence
  Description of Artificial Sequence: Synthetic oligonucleotide
atattgggtcgtggggtggttgggaacgg

SEQ ID NO: 5773 - DNA, 22 bp, Artificial Sequence
  Description of Artificial Sequence: Synthetic oligonucleotide
cgcgtaaacaactaatacaacc

SEQ ID NO: 5774 - DNA, 22 bp, Artificial Sequence
  Description of Artificial Sequence: Synthetic oligonucleotide
ccgcgtaaacaactaatacaac

SEQ ID NO: 5775 - DNA, 21 bp, Artificial Sequence
  Description of Artificial Sequence: Synthetic oligonucleotide
cggttagggtagtggaacgta

SEQ ID NO: 5776 - DNA, 22 bp, Artificial Sequence
  Description of Artificial Sequence: Synthetic oligonucleotide
aacgcctaccgactaaatatcc

SEQ ID NO: 5777 - DNA, 22 bp, Artificial Sequence
  Description of Artificial Sequence: Synthetic oligonucleotide
ggtggtcggtcgtatttatagc

SEQ ID NO: 5778 - DNA, 20 bp, Artificial Sequence
  Description of Artificial Sequence: Synthetic oligonucleotide
agaatcgggttttaggatcg

SEQ ID NO: 5779 - DNA, 23 bp, Artificial Sequence
  Description of Artificial Sequence: Synthetic oligonucleotide
accgcgtaaacaactaatacaac

SEQ ID NO: 5780 - DNA, 22 bp, Artificial Sequence
  Description of Artificial Sequence: Synthetic oligonucleotide
gggtggtcggtcgtatttatag

SEQ ID NO: 5781 - DNA, 22 bp, Artificial Sequence
  Description of Artificial Sequence: Synthetic oligonucleotide
gtcgtctaaccgaacgaaaact

SEQ ID NO: 5782 - DNA, 21 bp, Artificial Sequence
  Description of Artificial Sequence: Synthetic oligonucleotide
gttagacgacgagtagggtcg

SEQ ID NO: 5783 - DNA, 21 bp, Artificial Sequence
  Description of Artificial Sequence: Synthetic oligonucleotide
aacacgaaaataacgaaaccc

SEQ ID NO: 5784 - DNA, 30 bp, Artificial Sequence
  Description of Artificial Sequence: Synthetic oligonucleotide
ttcgaggttttttggtggcgcgcgagtcgt

SEQ ID NO: 5785 - DNA, 21 bp, Artificial Sequence
  Description of Artificial Sequence: Synthetic oligonucleotide
gaatcgggttttaggatcgtt

SEQ ID NO: 5786 - DNA, 21 bp, Artificial Sequence
  Description of Artificial Sequence: Synthetic oligonucleotide
cgtctaaccgaacgaaaacta

SEQ ID NO: 5787 - DNA, 22 bp, Artificial Sequence
  Description of Artificial Sequence: Synthetic oligonucleotide
cggttagggtagtggaacgtag

SEQ ID NO: 5788 - DNA, 23 bp, Artificial Sequence
  Description of Artificial Sequence: Synthetic oligonucleotide
aaaacgcctaccgactaaatatc

SEQ ID NO: 5789 - DNA, 21 bp, Artificial Sequence
  Description of Artificial Sequence: Synthetic oligonucleotide
cctaccgactaaatatccgcc

SEQ ID NO: 5790 - DNA, 21 bp, Artificial Sequence
  Description of Artificial Sequence: Synthetic oligonucleotide
cgaccctactcgtcgtctaac

SEQ ID NO: 5791 - DNA, 20 bp, Artificial Sequence
  Description of Artificial Sequence: Synthetic oligonucleotide
tcggttagacgacgagtagg

SEQ ID NO: 5792 - DNA, 20 bp, Artificial Sequence
  Description of Artificial Sequence: Synthetic oligonucleotide
ttagacgacgagtagggtcg

SEQ ID NO: 5793 - DNA, 20 bp, Artificial Sequence
  Description of Artificial Sequence: Synthetic oligonucleotide
tcggaaaaattagagaacgg

SEQ ID NO: 5794 - DNA, 20 bp, Artificial Sequence
  Description of Artificial Sequence: Synthetic oligonucleotide
aatcgggttttaggatcgtt

SEQ ID NO: 5795 - DNA, 22 bp, Artificial Sequence
  Description of Artificial Sequence: Synthetic oligonucleotide
ctaaaacgcctaccgactaaat

SEQ ID NO: 5796 - DNA, 23 bp, Artificial Sequence
  Description of Artificial Sequence: Synthetic oligonucleotide
aacacgaacgtataaaaacgact

SEQ ID NO: 5797 - DNA, 22 bp, Artificial Sequence
  Description of Artificial Sequence: Synthetic oligonucleotide
ttttaggatcgttgagtttcgt

SEQ ID NO: 5798 - DNA, 19 bp, Artificial Sequence
  Description of Artificial Sequence: Synthetic oligonucleotide
atccgaacccgatacgtta

SEQ ID NO: 5799 - DNA, 46 bp, Artificial Sequence
  Description of Artificial Sequence: Synthetic oligonucleotide
gacgttaggtcgtcggtttttttgttttcgttgagatggataacgt

SEQ ID NO: 5800 - DNA, 21 bp, Artificial Sequence
  Description of Artificial Sequence: Synthetic oligonucleotide
gcctaccgactaaatatccgc

SEQ ID NO: 5801 - DNA, 21 bp, Artificial Sequence
  Description of Artificial Sequence: Synthetic oligonucleotide
gcggttgcgttatttttgtat

SEQ ID NO: 5802 - DNA, 21 bp, Artificial Sequence
  Description of Artificial Sequence: Synthetic oligonucleotide
aaccgttctctaatttttccg

SEQ ID NO: 5803 - DNA, 22 bp, Artificial Sequence
  Description of Artificial Sequence: Synthetic oligonucleotide
gagtaggttcgtgtagaatcgg

SEQ ID NO: 5804 - DNA, 19 bp, Artificial Sequence
  Description of Artificial Sequence: Synthetic oligonucleotide
accaaaactccgaaaacga

SEQ ID NO: 5805 - DNA, 35 bp, Artificial Sequence
  Description of Artificial Sequence: Synthetic oligonucleotide
atcgttgagtttcgtagggcgtttttgggggacgt

SEQ ID NO: 5806 - DNA, 22 bp, Artificial Sequence
  Description of Artificial Sequence: Synthetic oligonucleotide
aaacgcctaccgactaaatatc

SEQ ID NO: 5807 - DNA, 20 bp, Artificial Sequence
  Description of Artificial Sequence: Synthetic oligonucleotide
aatccgaacccgatacgtta

SEQ ID NO: 5808 - DNA, 21 bp, Artificial Sequence
  Description of Artificial Sequence: Synthetic oligonucleotide
gttcggttagacgacgagtag

SEQ ID NO: 5809 - DNA, 19 bp, Artificial Sequence
  Description of Artificial Sequence: Synthetic oligonucleotide
aaccaaaactccgaaaacg

SEQ ID NO: 5810 - DNA, 19 bp, Artificial Sequence
  Description of Artificial Sequence: Synthetic oligonucleotide
tcgttttcggagttttggt

SEQ ID NO: 5811 - DNA, 22 bp, Artificial Sequence
  Description of Artificial Sequence: Synthetic oligonucleotide
aatcaccgcgtaaacaactaat

SEQ ID NO: 5812 - DNA, 21 bp, Artificial Sequence
  Description of Artificial Sequence: Synthetic oligonucleotide
cgtgtagaatcgggttttagg

SEQ ID NO: 5813 - DNA, 21 bp, Artificial Sequence
  Description of Artificial Sequence: Synthetic oligonucleotide
acgttatccatctcaacgaaa

SEQ ID NO: 5814 - DNA, 20 bp, Artificial Sequence
  Description of Artificial Sequence: Synthetic oligonucleotide
taacgtatcgggttcggatt

SEQ ID NO: 5815 - DNA, 38 bp, Artificial Sequence
  Description of Artificial Sequence: Synthetic oligonucleotide
ggcgttgagttgttttaacgcgtcgattttggcgtcgt

SEQ ID NO: 5816 - DNA, 21 bp, Artificial Sequence
  Description of Artificial Sequence: Synthetic oligonucleotide
ttcggttagacgacgagtagg

SEQ ID NO: 5817 - DNA, 22 bp, Artificial Sequence
  Description of Artificial Sequence: Synthetic oligonucleotide
taggatcgttgagtttcgtagg

SEQ ID NO: 5818 - DNA, 22 bp, Artificial Sequence
  Description of Artificial Sequence: Synthetic oligonucleotide
acacgaacgtataaaaacgact

SEQ ID NO: 5819 - DNA, 33 bp, Artificial Sequence
  Description of Artificial Sequence: Synthetic oligonucleotide
tagtgcgtgttagttttttcgtagttcgaggtt

SEQ ID NO: 5820 - DNA, 21 bp, Artificial Sequence
  Description of Artificial Sequence: Synthetic oligonucleotide
ctactcgtcgtctaaccgaac

SEQ ID NO: 5821 - DNA, 21 bp, Artificial Sequence
  Description of Artificial Sequence: Synthetic oligonucleotide
tcgtctaaccgaacgaaaact

SEQ ID NO: 5822 - DNA, 21 bp, Artificial Sequence
  Description of Artificial Sequence: Synthetic oligonucleotide
cctactcgtcgtctaaccgaa

SEQ ID NO: 5823 - DNA, 21 bp, Artificial Sequence
  Description of Artificial Sequence: Synthetic oligonucleotide
acacgaaaataacgaaaccca

SEQ ID NO: 5824 - DNA, 21 bp, Artificial Sequence
  Description of Artificial Sequence: Synthetic oligonucleotide
gtggtcggtcgtatttatagc

SEQ ID NO: 5825 - DNA, 23 bp, Artificial Sequence
  Description of Artificial Sequence: Synthetic oligonucleotide
caacacgaacgtataaaaacgac

SEQ ID NO: 5826 - DNA, 20 bp, Artificial Sequence
  Description of Artificial Sequence: Synthetic oligonucleotide
gaaccaaaactccgaaaacg

SEQ ID NO: 5827 - DNA, 21 bp, Artificial Sequence
  Description of Artificial Sequence: Synthetic oligonucleotide
acgcctaccgactaaatatcc

SEQ ID NO: 5828 - DNA, 22 bp, Artificial Sequence
  Description of Artificial Sequence: Synthetic oligonucleotide
gtacaacacgacgaaattaccc

SEQ ID NO: 5829 - DNA, 24 bp, Artificial Sequence
  Description of Artificial Sequence: Synthetic oligonucleotide
tacgcggtgatttgcgtcgtgggt

SEQ ID NO: 5830 - DNA, 20 bp, Artificial Sequence
  Description of Artificial Sequence: Synthetic oligonucleotide
cacgaaaataacgaaaccca

SEQ ID NO: 5831 - DNA, 20 bp, Artificial Sequence
  Description of Artificial Sequence: Synthetic oligonucleotide
aaaaacgccctacgaaactc

SEQ ID NO: 5832 - DNA, 21 bp, Artificial Sequence
  Description of Artificial Sequence: Synthetic oligonucleotide
cggttgcgttatttttgtatt

SEQ ID NO: 5833 - DNA, 20 bp, Artificial Sequence
  Description of Artificial Sequence: Synthetic oligonucleotide
cgttttcggagttttggttc

SEQ ID NO: 5834 - DNA, 20 bp, Artificial Sequence
  Description of Artificial Sequence: Synthetic oligonucleotide
ttcgttttcggagttttggt

SEQ ID NO: 5835 - DNA, 20 bp, Artificial Sequence
  Description of Artificial Sequence: Synthetic oligonucleotide
gttttcggagttttggttcg

SEQ ID NO: 5836 - DNA, 23 bp, Artificial Sequence
  Description of Artificial Sequence: Synthetic oligonucleotide
tcaccgcgtaaacaactaataca

SEQ ID NO: 5837 - DNA, 19 bp, Artificial Sequence
  Description of Artificial Sequence: Synthetic oligonucleotide
ccaaaactccgaaaacgaa

SEQ ID NO: 5838 - DNA, 20 bp, Artificial Sequence
  Description of Artificial Sequence: Synthetic oligonucleotide
tttcgttgagatggataacg

SEQ ID NO: 5839 - DNA, 21 bp, Artificial Sequence
  Description of Artificial Sequence: Synthetic oligonucleotide
ataacgaaacccaacacgaac

SEQ ID NO: 5840 - DNA, 19 bp, Artificial Sequence
  Description of Artificial Sequence: Synthetic oligonucleotide
acgtttcgttttcggagtt

SEQ ID NO: 5841 - DNA, 20 bp, Artificial Sequence
  Description of Artificial Sequence: Synthetic oligonucleotide
cggttagacgacgagtaggg

SEQ ID NO: 5842 - DNA, 19 bp, Artificial Sequence
  Description of Artificial Sequence: Synthetic oligonucleotide
ccgactaaatatccgcctc

SEQ ID NO: 5843 - DNA, 19 bp, Artificial Sequence
  Description of Artificial Sequence: Synthetic oligonucleotide
cgactaaatatccgcctcc

SEQ ID NO: 5844 - DNA, 19 bp, Artificial Sequence
  Description of Artificial Sequence: Synthetic oligonucleotide
ttttcggagttttggttcg

SEQ ID NO: 5845 - DNA, 24 bp, Artificial Sequence
  Description of Artificial Sequence: Synthetic oligonucleotide
taaaacgcctaccgactaaatatc

SEQ ID NO: 5846 - DNA, 22 bp, Artificial Sequence
  Description of Artificial Sequence: Synthetic oligonucleotide
cacgtacaacacgacgaaatta

SEQ ID NO: 5847 - DNA, 21 bp, Artificial Sequence
  Description of Artificial Sequence: Synthetic oligonucleotide
aaactaacacgcactaacgcc

SEQ ID NO: 5848 - DNA, 22 bp, Artificial Sequence
  Description of Artificial Sequence: Synthetic oligonucleotide
aaatcaccgcgtaaacaactaa

SEQ ID NO: 5849 - DNA, 22 bp, Artificial Sequence
  Description of Artificial Sequence: Synthetic oligonucleotide
attagttgtttacgcggtgatt

SEQ ID NO: 5850 - DNA, 21 bp, Artificial Sequence
  Description of Artificial Sequence: Synthetic oligonucleotide
tcgacgataaccaaattaaaa

SEQ ID NO: 5851 - DNA, 25 bp, Artificial Sequence
  Description of Artificial Sequence: Synthetic oligonucleotide
gtacgtgttgttgcgggcgtttcgt

SEQ ID NO: 5852 - DNA, 20 bp, Artificial Sequence
  Description of Artificial Sequence: Synthetic oligonucleotide
cctacgaaactcaacgatcc

SEQ ID NO: 5853 - DNA, 22 bp, Artificial Sequence
  Description of Artificial Sequence: Synthetic oligonucleotide
cgagtaggttcgtgtagaatcg

SEQ ID NO: 5854 - DNA, 18 bp, Artificial Sequence
  Description of Artificial Sequence: Synthetic oligonucleotide
ttggttattgcggagtcg

SEQ ID NO: 5855 - DNA, 22 bp, Artificial Sequence
  Description of Artificial Sequence: Synthetic oligonucleotide
cgtctaaccgaacgaaaactac

SEQ ID NO: 5856 - DNA, 22 bp, Artificial Sequence
  Description of Artificial Sequence: Synthetic oligonucleotide
gtctaaccgaacgaaaactacg

SEQ ID NO: 5857 - DNA, 19 bp, Artificial Sequence
  Description of Artificial Sequence: Synthetic oligonucleotide
gagtagggtcggcgttagt

SEQ ID NO: 5858 - DNA, 24 bp, Artificial Sequence
  Description of Artificial Sequence: Synthetic oligonucleotide
ctacgaaactcaacgatcctaaaa

SEQ ID NO: 5859 - DNA, 18 bp, Artificial Sequence
  Description of Artificial Sequence: Synthetic oligonucleotide
acgtatcgggttcggatt

SEQ ID NO: 5860 - DNA, 19 bp, Artificial Sequence
  Description of Artificial Sequence: Synthetic oligonucleotide
aacgtatcgggttcggatt

SEQ ID NO: 5861 - DNA, 21 bp, Artificial Sequence
  Description of Artificial Sequence: Synthetic oligonucleotide
aataacgaaacccaacacgaa

SEQ ID NO: 5862 - DNA, 23 bp, Artificial Sequence
  Description of Artificial Sequence: Synthetic oligonucleotide
tttaggatcgttgagtttcgtag

SEQ ID NO: 5863 - DNA, 21 bp, Artificial Sequence
  Description of Artificial Sequence: Synthetic oligonucleotide
aggatcgttgagtttcgtagg

SEQ ID NO: 5864 - DNA, 20 bp, Artificial Sequence
  Description of Artificial Sequence: Synthetic oligonucleotide
accaaaactccgaaaacgaa

SEQ ID NO: 5865 - DNA, 20 bp, Artificial Sequence
  Description of Artificial Sequence: Synthetic oligonucleotide
gttgtttacgcggtgatttg

SEQ ID NO: 5866 - DNA, 22 bp, Artificial Sequence
  Description of Artificial Sequence: Synthetic oligonucleotide
tcgacgataaccaaattaaaaa

SEQ ID NO: 5867 - DNA, 20 bp, Artificial Sequence
  Description of Artificial Sequence: Synthetic oligonucleotide
taacgaaacccaacacgaac

SEQ ID NO: 5868 - DNA, 20 bp, Artificial Sequence
  Description of Artificial Sequence: Synthetic oligonucleotide
gggggatcgttatattcgtc

SEQ ID NO: 5869 - DNA, 29 bp, Artificial Sequence
  Description of Artificial Sequence: Synthetic oligonucleotide
ttttcgttcggttagacgacgagtagggt

SEQ ID NO: 5870 - DNA, 19 bp, Artificial Sequence
  Description of Artificial Sequence: Synthetic oligonucleotide
acgccctacgaaactcaac

SEQ ID NO: 5871 - DNA, 20 bp, Artificial Sequence
  Description of Artificial Sequence: Synthetic oligonucleotide
gccctacgaaactcaacgat

SEQ ID NO: 5872 - DNA, 18 bp, Artificial Sequence
  Description of Artificial Sequence: Synthetic oligonucleotide
tccgaacccgatacgtta

SEQ ID NO: 5873 - DNA, 20 bp, Artificial Sequence
  Description of Artificial Sequence: Synthetic oligonucleotide
cgtctaaccgaacgaaaact

SEQ ID NO: 5874 - DNA, 22 bp, Artificial Sequence
  Description of Artificial Sequence: Synthetic oligonucleotide
gtaggttcgtgtagaatcgggt

SEQ ID NO: 5875 - DNA, 22 bp, Artificial Sequence
  Description of Artificial Sequence: Synthetic oligonucleotide
acccaacacgaacgtataaaaa

SEQ ID NO: 5876 - DNA, 22 bp, Artificial Sequence
  Description of Artificial Sequence: Synthetic oligonucleotide
aacccaacacgaacgtataaaa

SEQ ID NO: 5877 - DNA, 22 bp, Artificial Sequence
  Description of Artificial Sequence: Synthetic oligonucleotide
aaacccaacacgaacgtataaa

SEQ ID NO: 5878 - DNA, 22 bp, Artificial Sequence
  Description of Artificial Sequence: Synthetic oligonucleotide
cccaacacgaacgtataaaaac

SEQ ID NO: 5879 - DNA, 20 bp, Artificial Sequence
  Description of Artificial Sequence: Synthetic oligonucleotide
aacgccctacgaaactcaac

SEQ ID NO: 5880 - DNA, 19 bp, Artificial Sequence
  Description of Artificial Sequence: Synthetic oligonucleotide
aaaaaccgacgacctaacg

SEQ ID NO: 5881 - DNA, 20 bp, Artificial Sequence
  Description of Artificial Sequence: Synthetic oligonucleotide
caaaaacgccctacgaaact

SEQ ID NO: 5882 - DNA, 19 bp, Artificial Sequence
  Description of Artificial Sequence: Synthetic oligonucleotide
ttgtttacgcggtgatttg

SEQ ID NO: 5883 - DNA, 20 bp, Artificial Sequence
  Description of Artificial Sequence: Synthetic oligonucleotide
gggtagtggaacgtagtcgc

SEQ ID NO: 5884 - DNA, 21 bp, Artificial Sequence
  Description of Artificial Sequence: Synthetic oligonucleotide
aaaaactaaaacgcctaccga

SEQ ID NO: 5885 - DNA, 21 bp, Artificial Sequence
  Description of Artificial Sequence: Synthetic oligonucleotide
gggatcgttatattcgtcgtg

SEQ ID NO: 5886 - DNA, 22 bp, Artificial Sequence
  Description of Artificial Sequence: Synthetic oligonucleotide
ctaaccgaacgaaaactacgaa

SEQ ID NO: 5887 - DNA, 22 bp, Artificial Sequence
  Description of Artificial Sequence: Synthetic oligonucleotide
agtaggttcgtgtagaatcggg

SEQ ID NO: 5888 - DNA, 21 bp, Artificial Sequence
  Description of Artificial Sequence: Synthetic oligonucleotide
cgaaaataacgaaacccaaca

SEQ ID NO: 5889 - DNA, 19 bp, Artificial Sequence
  Description of Artificial Sequence: Synthetic oligonucleotide
aaacgccctacgaaactca

SEQ ID NO: 5890 - DNA, 21 bp, Artificial Sequence
  Description of Artificial Sequence: Synthetic oligonucleotide
tacaacacgacgaaattaccc

SEQ ID NO: 5891 - DNA, 22 bp, Artificial Sequence
  Description of Artificial Sequence: Synthetic oligonucleotide
cgtacaacacgacgaaattacc

SEQ ID NO: 5892 - DNA, 19 bp, Artificial Sequence
  Description of Artificial Sequence: Synthetic oligonucleotide
acgctcgtttcaactctcc

SEQ ID NO: 5893 - DNA, 21 bp, Artificial Sequence
  Description of Artificial Sequence: Synthetic oligonucleotide
aaatcaccgcgtaaacaacta

SEQ ID NO: 5894 - DNA, 21 bp, Artificial Sequence
  Description of Artificial Sequence: Synthetic oligonucleotide
taggttcgtgtagaatcgggt

SEQ ID NO: 5895 - DNA, 22 bp, Artificial Sequence
  Description of Artificial Sequence: Synthetic oligonucleotide
ttaggatcgttgagtttcgtag

SEQ ID NO: 5896 - DNA, 20 bp, Artificial Sequence
  Description of Artificial Sequence: Synthetic oligonucleotide
ttcggttagacgacgagtag

SEQ ID NO: 5897 - DNA, 23 bp, Artificial Sequence
  Description of Artificial Sequence: Synthetic oligonucleotide
gttttaggatcgttgagtttcgt

SEQ ID NO: 5898 - DNA, 21 bp, Artificial Sequence
  Description of Artificial Sequence: Synthetic oligonucleotide
aatcaccgcgtaaacaactaa

SEQ ID NO: 5899 - DNA, 20 bp, Artificial Sequence
  Description of Artificial Sequence: Synthetic oligonucleotide
ccctactcgtcgtctaaccg

SEQ ID NO: 5900 - DNA, 19 bp, Artificial Sequence
  Description of Artificial Sequence: Synthetic oligonucleotide
caacgatcctaaaacccga

SEQ ID NO: 5901 - DNA, 25 bp, Artificial Sequence
  Description of Artificial Sequence: Synthetic oligonucleotide
aacgagcgttcgcgagtaggttcgt

SEQ ID NO: 5902 - DNA, 20 bp, Artificial Sequence
  Description of Artificial Sequence: Synthetic oligonucleotide
ttttagtttcgtgagttcgc

SEQ ID NO: 5903 - DNA, 22 bp, Artificial Sequence
  Description of Artificial Sequence: Synthetic oligonucleotide
accgcgtaaacaactaatacaa

SEQ ID NO: 5904 - DNA, 18 bp, Artificial Sequence
  Description of Artificial Sequence: Synthetic oligonucleotide
tttcggagttttggttcg

SEQ ID NO: 5905 - DNA, 22 bp, Artificial Sequence
  Description of Artificial Sequence: Synthetic oligonucleotide
gaaacccaacacgaacgtataa

SEQ ID NO: 5906 - DNA, 21 bp, Artificial Sequence
  Description of Artificial Sequence: Synthetic oligonucleotide
gcgacgatcaaaacaataaaa

SEQ ID NO: 5907 - DNA, 22 bp, Artificial Sequence
  Description of Artificial Sequence: Synthetic oligonucleotide
gttagagttcgtagttcgcgtt

SEQ ID NO: 5908 - DNA, 28 bp, Artificial Sequence
  Description of Artificial Sequence: Synthetic oligonucleotide
gtcggtttttttcgcgcgtttggaagtg

SEQ ID NO: 5909 - DNA, 22 bp, Artificial Sequence
  Description of Artificial Sequence: Synthetic oligonucleotide
ctccgtaaaacgtccttaaaaa

SEQ ID NO: 5910 - DNA, 21 bp, Artificial Sequence
  Description of Artificial Sequence: Synthetic oligonucleotide
gagtagtttagcgtcgggttc

SEQ ID NO: 5911 - DNA, 26 bp, Artificial Sequence
  Description of Artificial Sequence: Synthetic oligonucleotide
tggcgggttagggtttcgagaacgag

SEQ ID NO: 5912 - DNA, 22 bp, Artificial Sequence
  Description of Artificial Sequence: Synthetic oligonucleotide
aaatcgtcacactcgtcgtact

SEQ ID NO: 5913 - DNA, 22 bp, Artificial Sequence
  Description of Artificial Sequence: Synthetic oligonucleotide
cgttattagaaggtttcgggtt

SEQ ID NO: 5914 - DNA, 33 bp, Artificial Sequence
  Description of Artificial Sequence: Synthetic oligonucleotide
ggaaagattagtacgtattggcgtcggttttgt

SEQ ID NO: 5915 - DNA, 21 bp, Artificial Sequence
  Description of Artificial Sequence: Synthetic oligonucleotide
cgtacaaaaccgaacttcaaa

SEQ ID NO: 5916 - DNA, 22 bp, Artificial Sequence
  Description of Artificial Sequence: Synthetic oligonucleotide
aggcgttgtttattttaacgag

SEQ ID NO: 5917 - DNA, 35 bp, Artificial Sequence
  Description of Artificial Sequence: Synthetic oligonucleotide
ggcgttttttaaggacgttttacggagtttagcgg

SEQ ID NO: 5918 - DNA, 21 bp, Artificial Sequence
  Description of Artificial Sequence: Synthetic oligonucleotide
aaatccgtacaaaaccgaact

SEQ ID NO: 5919 - DNA, 22 bp, Artificial Sequence
  Description of Artificial Sequence: Synthetic oligonucleotide
actccgtaaaacgtccttaaaa

SEQ ID NO: 5920 - DNA, 21 bp, Artificial Sequence
  Description of Artificial Sequence: Synthetic oligonucleotide
aaaatcgtcacactcgtcgta

SEQ ID NO: 5921 - DNA, 22 bp, Artificial Sequence
  Description of Artificial Sequence: Synthetic oligonucleotide
cgttgtttattttaacgagggt

SEQ ID NO: 5922 - DNA, 21 bp, Artificial Sequence
  Description of Artificial Sequence: Synthetic oligonucleotide
cgtactacccttcgcaatctt

SEQ ID NO: 5923 - DNA, 22 bp, Artificial Sequence
  Description of Artificial Sequence: Synthetic oligonucleotide
ctcgttaaaataaacaacgcct

SEQ ID NO: 5924 - DNA, 22 bp, Artificial Sequence
  Description of Artificial Sequence: Synthetic oligonucleotide
ttggtatagttatcgttagcgg

SEQ ID NO: 5925 - DNA, 28 bp, Artificial Sequence
  Description of Artificial Sequence: Synthetic oligonucleotide
gtcggtagcggcgttagagtcgacgcgt

SEQ ID NO: 5926 - DNA, 22 bp, Artificial Sequence
  Description of Artificial Sequence: Synthetic oligonucleotide
tcgttaaaataaacaacgcctc

SEQ ID NO: 5927 - DNA, 21 bp, Artificial Sequence
  Description of Artificial Sequence: Synthetic oligonucleotide
aatcgtcacactcgtcgtact

SEQ ID NO: 5928 - DNA, 22 bp, Artificial Sequence
  Description of Artificial Sequence: Synthetic oligonucleotide
aaaaatcgtcacactcgtcgta

SEQ ID NO: 5929 - DNA, 21 bp, Artificial Sequence
  Description of Artificial Sequence: Synthetic oligonucleotide
gttggagtagtttagcgtcgg

SEQ ID NO: 5930 - DNA, 22 bp, Artificial Sequence
  Description of Artificial Sequence: Synthetic oligonucleotide
gcgacgatcaaaacaataaaac

SEQ ID NO: 5931 - DNA, 21 bp, Artificial Sequence
  Description of Artificial Sequence: Synthetic oligonucleotide
tcgttagagttcgtagttcgc

SEQ ID NO: 5932 - DNA, 22 bp, Artificial Sequence
  Description of Artificial Sequence: Synthetic oligonucleotide
gacgatcaaaacaataaaacgc

SEQ ID NO: 5933 - DNA, 22 bp, Artificial Sequence
  Description of Artificial Sequence: Synthetic oligonucleotide
ataaaaataaacgcgacgatca

SEQ ID NO: 5934 - DNA, 20 bp, Artificial Sequence
  Description of Artificial Sequence: Synthetic oligonucleotide
acaaatccgtacaaaaccga

SEQ ID NO: 5935 - DNA, 23 bp, Artificial Sequence
  Description of Artificial Sequence: Synthetic oligonucleotide
aactccgtaaaacgtccttaaaa

SEQ ID NO: 5936 - DNA, 20 bp, Artificial Sequence
  Description of Artificial Sequence: Synthetic oligonucleotide
ttggagtagtttagcgtcgg

SEQ ID NO: 5937 - DNA, 21 bp, Artificial Sequence
  Description of Artificial Sequence: Synthetic oligonucleotide
gcgttggagtagtttagcgtc

SEQ ID NO: 5938 - DNA, 24 bp, Artificial Sequence
  Description of Artificial Sequence: Synthetic oligonucleotide
aattggtatagttatcgttagcgg

SEQ ID NO: 5939 - DNA, 21 bp, Artificial Sequence
  Description of Artificial Sequence: Synthetic oligonucleotide
tcgtactacccttcgcaatct

SEQ ID NO: 5940 - DNA, 21 bp, Artificial Sequence
  Description of Artificial Sequence: Synthetic oligonucleotide
cgaacttcaaaaccgctaaac

SEQ ID NO: 5941 - DNA, 36 bp, Artificial Sequence
  Description of Artificial Sequence: Synthetic oligonucleotide
gtcggcgatttggcgttttttaaggacgttttacgg

SEQ ID NO: 5942 - DNA, 21 bp, Artificial Sequence
  Description of Artificial Sequence: Synthetic oligonucleotide
ttaacgagggtagaggagtcg

SEQ ID NO: 5943 - DNA, 23 bp, Artificial Sequence
  Description of Artificial Sequence: Synthetic oligonucleotide
cgttgtttattttaacgagggta

SEQ ID NO: 5944 - DNA, 23 bp, Artificial Sequence
  Description of Artificial Sequence: Synthetic oligonucleotide
attggtatagttatcgttagcgg

SEQ ID NO: 5945 - DNA, 20 bp, Artificial Sequence
  Description of Artificial Sequence: Synthetic oligonucleotide
ggagtagtttagcgtcgggt

SEQ ID NO: 5946 - DNA, 21 bp, Artificial Sequence
  Description of Artificial Sequence: Synthetic oligonucleotide
cgaacaaatccgtacaaaacc

SEQ ID NO: 5947 - DNA, 21 bp, Artificial Sequence
  Description of Artificial Sequence: Synthetic oligonucleotide
aacaaatccgtacaaaaccga

SEQ ID NO: 5948 - DNA, 21 bp, Artificial Sequence
  Description of Artificial Sequence: Synthetic oligonucleotide
gaacaaatccgtacaaaaccg

SEQ ID NO: 5949 - DNA, 20 bp, Artificial Sequence
  Description of Artificial Sequence: Synthetic oligonucleotide
acccgacgctaaactactcc

SEQ ID NO: 5950 - DNA, 22 bp, Artificial Sequence
  Description of Artificial Sequence: Synthetic oligonucleotide
agttgttcgttagatttacggc

SEQ ID NO: 5951 - DNA, 23 bp, Artificial Sequence
  Description of Artificial Sequence: Synthetic oligonucleotide
atcgttagcggcgtcggtagcgg

SEQ ID NO: 5952 - DNA, 21 bp, Artificial Sequence
  Description of Artificial Sequence: Synthetic oligonucleotide
gcgaacaaatccgtacaaaac

SEQ ID NO: 5953 - DNA, 22 bp, Artificial Sequence
  Description of Artificial Sequence: Synthetic oligonucleotide
tttaacgagggtagaggagtcg

SEQ ID NO: 5954 - DNA, 20 bp, Artificial Sequence
  Description of Artificial Sequence: Synthetic oligonucleotide
caaatccgtacaaaaccgaa

SEQ ID NO: 5955 - DNA, 21 bp, Artificial Sequence
  Description of Artificial Sequence: Synthetic oligonucleotide
caaaacaataaaacgcaatcg

SEQ ID NO: 5956 - DNA, 21 bp, Artificial Sequence
  Description of Artificial Sequence: Synthetic oligonucleotide
caaatccgtacaaaaccgaac

SEQ ID NO: 5957 - DNA, 22 bp, Artificial Sequence
  Description of Artificial Sequence: Synthetic oligonucleotide
gcgttgtttattttaacgaggg

SEQ ID NO: 5958 - DNA, 21 bp, Artificial Sequence
  Description of Artificial Sequence: Synthetic oligonucleotide
taaaaataaacgcgacgatca

SEQ ID NO: 5959 - DNA, 21 bp, Artificial Sequence
  Description of Artificial Sequence: Synthetic oligonucleotide
aacccgacgctaaactactcc

SEQ ID NO: 5960 - DNA, 20 bp, Artificial Sequence
  Description of Artificial Sequence: Synthetic oligonucleotide
cgcgttattagaaggtttcg

SEQ ID NO: 5961 - DNA, 22 bp, Artificial Sequence
  Description of Artificial Sequence: Synthetic oligonucleotide
cgacgatcaaaacaataaaacg

SEQ ID NO: 5962 - DNA, 22 bp, Artificial Sequence
  Description of Artificial Sequence: Synthetic oligonucleotide
acgatcaaaacaataaaacgca

SEQ ID NO: 5963 - DNA, 21 bp, Artificial Sequence
  Description of Artificial Sequence: Synthetic oligonucleotide
ttagagttcgtagttcgcgtt

SEQ ID NO: 5964 - DNA, 20 bp, Artificial Sequence
  Description of Artificial Sequence: Synthetic oligonucleotide
acgctaaactactccaacgc

SEQ ID NO: 5965 - DNA, 23 bp, Artificial Sequence
  Description of Artificial Sequence: Synthetic oligonucleotide
cctactacgacaataacccttcg

SEQ ID NO: 5966 - DNA, 22 bp, Artificial Sequence
  Description of Artificial Sequence: Synthetic oligonucleotide
cgtttatgacggtgaggaagta

SEQ ID NO: 5967 - DNA, 34 bp, Artificial Sequence
  Description of Artificial Sequence: Synthetic oligonucleotide
gaaggtgttgtattggtcgatagttacgatgagt

SEQ ID NO: 5968 - DNA, 22 bp, Artificial Sequence
  Description of Artificial Sequence: Synthetic oligonucleotide
ctactacgacaataacccttcg

SEQ ID NO: 5969 - DNA, 23 bp, Artificial Sequence
  Description of Artificial Sequence: Synthetic oligonucleotide
gaggcgttgtttattttaacgag

SEQ ID NO: 5970 - DNA, 21 bp, Artificial Sequence
  Description of Artificial Sequence: Synthetic oligonucleotide
cgatcaaaacaataaaacgca

SEQ ID NO: 5971 - DNA, 21 bp, Artificial Sequence
  Description of Artificial Sequence: Synthetic oligonucleotide
tccgtaaaacgtccttaaaaa

SEQ ID NO: 5972 - DNA, 23 bp, Artificial Sequence
  Description of Artificial Sequence: Synthetic oligonucleotide
tataaaaataaacgcgacgatca

SEQ ID NO: 5973 - DNA, 21 bp, Artificial Sequence
  Description of Artificial Sequence: Synthetic oligonucleotide
tcaaaaccgctaaactccgta

SEQ ID NO: 5974 - DNA, 29 bp, Artificial Sequence
  Description of Artificial Sequence: Synthetic oligonucleotide
gtcggcgatttggcgttttttaaggacgt

SEQ ID NO: 5975 - DNA, 25 bp, Artificial Sequence
  Description of Artificial Sequence: Synthetic oligonucleotide
taattggtatagttatcgttagcgg

SEQ ID NO: 5976 - DNA, 21 bp, Artificial Sequence
  Description of Artificial Sequence: Synthetic oligonucleotide
ggcgttgtttattttaacgag

SEQ ID NO: 5977 - DNA, 19 bp, Artificial Sequence
  Description of Artificial Sequence: Synthetic oligonucleotide
aaaccgaacttcaaaaccg

SEQ ID NO: 5978 - DNA, 22 bp, Artificial Sequence
  Description of Artificial Sequence: Synthetic oligonucleotide
ccctcgttaaaataaacaacgc

SEQ ID NO: 5979 - DNA, 26 bp, Artificial Sequence
  Description of Artificial Sequence: Synthetic oligonucleotide
ttggcgggttagggtttcgagaacga

SEQ ID NO: 5980 - DNA, 19 bp, Artificial Sequence
  Description of Artificial Sequence: Synthetic oligonucleotide
gccgaccgctacctaataa

SEQ ID NO: 5981 - DNA, 22 bp, Artificial Sequence
  Description of Artificial Sequence: Synthetic oligonucleotide
tagtacgacgagtgtgacgatt

SEQ ID NO: 5982 - DNA, 22 bp, Artificial Sequence
  Description of Artificial Sequence: Synthetic oligonucleotide
tgcggtcggttattcggcgcga

SEQ ID NO: 5983 - DNA, 22 bp, Artificial Sequence
  Description of Artificial Sequence: Synthetic oligonucleotide
gacgaactcttcacgctaatac

SEQ ID NO: 5984 - DNA, 22 bp, Artificial Sequence
  Description of Artificial Sequence: Synthetic oligonucleotide
ttggtcgatagttacgatgagt

SEQ ID NO: 5985 - DNA, 27 bp, Artificial Sequence
  Description of Artificial Sequence: Synthetic oligonucleotide
agtaggaagtcggcgatgttgatgggt

SEQ ID NO: 5986 - DNA, 22 bp, Artificial Sequence
  Description of Artificial Sequence: Synthetic oligonucleotide
cgaacttcaaaaccgctaaact

SEQ ID NO: 5987 - DNA, 20 bp, Artificial Sequence
  Description of Artificial Sequence: Synthetic oligonucleotide
gtaaatccgcgacgacatta

SEQ ID NO: 5988 - DNA, 21 bp, Artificial Sequence
  Description of Artificial Sequence: Synthetic oligonucleotide
gaagttcggttttgtacggat

SEQ ID NO: 5989 - DNA, 35 bp, Artificial Sequence
  Description of Artificial Sequence: Synthetic oligonucleotide
ttcggaggaggggatcgtttttagttattttacgg

SEQ ID NO: 5990 - DNA, 21 bp, Artificial Sequence
  Description of Artificial Sequence: Synthetic oligonucleotide
gcgttattagaaggtttcggg

SEQ ID NO: 5991 - DNA, 21 bp, Artificial Sequence
  Description of Artificial Sequence: Synthetic oligonucleotide
tttgaagttcggttttgtacg

SEQ ID NO: 5992 - DNA, 21 bp, Artificial Sequence
  Description of Artificial Sequence: Synthetic oligonucleotide
aataaacgcgacgatcaaaac

SEQ ID NO: 5993 - DNA, 22 bp, Artificial Sequence
  Description of Artificial Sequence: Synthetic oligonucleotide
cgcgataaacctaaccgtataa

SEQ ID NO: 5994 - DNA, 19 bp, Artificial Sequence
  Description of Artificial Sequence: Synthetic oligonucleotide
gtattggcgtcggttttgt

SEQ ID NO: 5995 - DNA, 38 bp, Artificial Sequence
  Description of Artificial Sequence: Synthetic oligonucleotide
ggcgaagattgcgaagggtagtacgacgagtgtgacga

SEQ ID NO: 5996 - DNA, 21 bp, Artificial Sequence
  Description of Artificial Sequence: Synthetic oligonucleotide
acaaatccgtacaaaaccgaa

SEQ ID NO: 5997 - DNA, 24 bp, Artificial Sequence
  Description of Artificial Sequence: Synthetic oligonucleotide
gcgataaacctaaccgtataaaaa

SEQ ID NO: 5998 - DNA, 21 bp, Artificial Sequence
  Description of Artificial Sequence: Synthetic oligonucleotide
ggttgcggaaagattagtacg

SEQ ID NO: 5999 - DNA, 22 bp, Artificial Sequence
  Description of Artificial Sequence: Synthetic oligonucleotide
ttttgaagttcggttttgtacg

SEQ ID NO: 6000 - DNA, 20 bp, Artificial Sequence
  Description of Artificial Sequence: Synthetic oligonucleotide
ataaacgcgacgatcaaaac

SEQ ID NO: 6001 - DNA, 22 bp, Artificial Sequence
  Description of Artificial Sequence: Synthetic oligonucleotide
agtacgacgagtgtgacgattt

SEQ ID NO: 6002 - DNA, 20 bp, Artificial Sequence
  Description of Artificial Sequence: Synthetic oligonucleotide
caaaaccgctaaactccgta

SEQ ID NO: 6003 - DNA, 20 bp, Artificial Sequence
  Description of Artificial Sequence: Synthetic oligonucleotide
aacaaatccgtacaaaaccg

SEQ ID NO: 6004 - DNA, 20 bp, Artificial Sequence
  Description of Artificial Sequence: Synthetic oligonucleotide
aaaaataaacgcgacgatca

SEQ ID NO: 6005 - DNA, 20 bp, Artificial Sequence
  Description of Artificial Sequence: Synthetic oligonucleotide
cgactcctctaccctcgtta

SEQ ID NO: 6006 - DNA, 19 bp, Artificial Sequence
  Description of Artificial Sequence: Synthetic oligonucleotide
cccgacgctaaactactcc

SEQ ID NO: 6007 - DNA, 20 bp, Artificial Sequence
  Description of Artificial Sequence: Synthetic oligonucleotide
taacgagggtagaggagtcg

SEQ ID NO: 6008 - DNA, 21 bp, Artificial Sequence
  Description of Artificial Sequence: Synthetic oligonucleotide
cgacgaactcttcacgctaat

SEQ ID NO: 6009 - DNA, 21 bp, Artificial Sequence
  Description of Artificial Sequence: Synthetic oligonucleotide
cgttaaaataaacaacgcctc

SEQ ID NO: 6010 - DNA, 21 bp, Artificial Sequence
  Description of Artificial Sequence: Synthetic oligonucleotide
gttaaaataaacaacgcctcg

SEQ ID NO: 6011 - DNA, 21 bp, Artificial Sequence
  Description of Artificial Sequence: Synthetic oligonucleotide
cctcgttaaaataaacaacgc

SEQ ID NO: 6012 - DNA, 20 bp, Artificial Sequence
  Description of Artificial Sequence: Synthetic oligonucleotide
accgaacttcaaaaccgcta

SEQ ID NO: 6013 - DNA, 20 bp, Artificial Sequence
  Description of Artificial Sequence: Synthetic oligonucleotide
aatccgtacaaaaccgaact

SEQ ID NO: 6014 - DNA, 20 bp, Artificial Sequence
  Description of Artificial Sequence: Synthetic oligonucleotide
gtagtttagcgtcgggttcg

SEQ ID NO: 6015 - DNA, 20 bp, Artificial Sequence
  Description of Artificial Sequence: Synthetic oligonucleotide
agtagtttagcgtcgggttc

SEQ ID NO: 6016 - DNA, 23 bp, Artificial Sequence
  Description of Artificial Sequence: Synthetic oligonucleotide
attggtcgatagttacgatgagt

SEQ ID NO: 6017 - DNA, 21 bp, Artificial Sequence
  Description of Artificial Sequence: Synthetic oligonucleotide
aaataaacgcgacgatcaaaa

SEQ ID NO: 6018 - DNA, 19 bp, Artificial Sequence
  Description of Artificial Sequence: Synthetic oligonucleotide
tcaaaaccgctaaactccg

SEQ ID NO: 6019 - DNA, 19 bp, Artificial Sequence
  Description of Artificial Sequence: Synthetic oligonucleotide
ccgaacttcaaaaccgcta

SEQ ID NO: 6020 - DNA, 21 bp, Artificial Sequence
  Description of Artificial Sequence: Synthetic oligonucleotide
gcctctacacgctcgtactaa

SEQ ID NO: 6021 - DNA, 22 bp, Artificial Sequence
  Description of Artificial Sequence: Synthetic oligonucleotide
agtcgtatggtatgtagtcggt

SEQ ID NO: 6022 - DNA, 26 bp, Artificial Sequence
  Description of Artificial Sequence: Synthetic oligonucleotide
agatggtggatacggggatggcgaag

SEQ ID NO: 6023 - DNA, 22 bp, Artificial Sequence
  Description of Artificial Sequence: Synthetic oligonucleotide
gtacgacgagtgtgacgatttt

SEQ ID NO: 6024 - DNA, 19 bp, Artificial Sequence
  Description of Artificial Sequence: Synthetic oligonucleotide
tagtttagcgtcgggttcg

SEQ ID NO: 6025 - DNA, 21 bp, Artificial Sequence
  Description of Artificial Sequence: Synthetic oligonucleotide
tactacccttcgcaatcttcg

SEQ ID NO: 6026 - DNA, 23 bp, Artificial Sequence
  Description of Artificial Sequence: Synthetic oligonucleotide
agtttagtacgagcgtgtagagg

SEQ ID NO: 6027 - DNA, 21 bp, Artificial Sequence
  Description of Artificial Sequence: Synthetic oligonucleotide
cgtactaatctttccgcaacc

SEQ ID NO: 6028 - DNA, 24 bp, Artificial Sequence
  Description of Artificial Sequence: Synthetic oligonucleotide
tttagtcgtatggtatgtagtcgg

SEQ ID NO: 6029 - DNA, 27 bp, Artificial Sequence
  Description of Artificial Sequence: Synthetic oligonucleotide
ggggatggcgaagtttagtacgagcgt

SEQ ID NO: 6030 - DNA, 19 bp, Artificial Sequence
  Description of Artificial Sequence: Synthetic oligonucleotide
taaatccgcgacgacatta

SEQ ID NO: 6031 - DNA, 21 bp, Artificial Sequence
  Description of Artificial Sequence: Synthetic oligonucleotide
gaggcgttgtttattttaacg

SEQ ID NO: 6032 - DNA, 22 bp, Artificial Sequence
  Description of Artificial Sequence: Synthetic oligonucleotide
gtttagtacgagcgtgtagagg

SEQ ID NO: 6033 - DNA, 18 bp, Artificial Sequence
  Description of Artificial Sequence: Synthetic oligonucleotide
cgcgacgatcaaaacaat

SEQ ID NO: 6034 - DNA, 21 bp, Artificial Sequence
  Description of Artificial Sequence: Synthetic oligonucleotide
tacgacgagtgtgacgatttt

SEQ ID NO: 6035 - DNA, 19 bp, Artificial Sequence
  Description of Artificial Sequence: Synthetic oligonucleotide
cgacgaactcttcacgcta

SEQ ID NO: 6036 - DNA, 19 bp, Artificial Sequence
  Description of Artificial Sequence: Synthetic oligonucleotide
caatcttcgcccgactaaa

SEQ ID NO: 6037 - DNA, 22 bp, Artificial Sequence
  Description of Artificial Sequence: Synthetic oligonucleotide
tagagttcgtagttcgcgtttt

SEQ ID NO: 6038 - DNA, 22 bp, Artificial Sequence
  Description of Artificial Sequence: Synthetic oligonucleotide
ttagagttcgtagttcgcgttt

SEQ ID NO: 6039 - DNA, 19 bp, Artificial Sequence
  Description of Artificial Sequence: Synthetic oligonucleotide
cgactcctctaccctcgtt

SEQ ID NO: 6040 - DNA, 22 bp, Artificial Sequence
  Description of Artificial Sequence: Synthetic oligonucleotide
gtatagttatcgttagcggcgt

SEQ ID NO: 6041 - DNA, 24 bp, Artificial Sequence
  Description of Artificial Sequence: Synthetic oligonucleotide
aaactccgtaaaacgtccttaaaa

SEQ ID NO: 6042 - DNA, 22 bp, Artificial Sequence
  Description of Artificial Sequence: Synthetic oligonucleotide
gccgtaaatctaacgaacaact

SEQ ID NO: 6043 - DNA, 18 bp, Artificial Sequence
  Description of Artificial Sequence: Synthetic oligonucleotide
aagtcggcgatgttgatg

SEQ ID NO: 6044 - DNA, 25 bp, Artificial Sequence
  Description of Artificial Sequence: Synthetic oligonucleotide
tggtgacggtttttatgcggggcgt

SEQ ID NO: 6045 - DNA, 23 bp, Artificial Sequence
  Description of Artificial Sequence: Synthetic oligonucleotide
aactcatcgtaactatcgaccaa

SEQ ID NO: 6046 - DNA, 20 bp, Artificial Sequence
  Description of Artificial Sequence: Synthetic oligonucleotide
gtaggtgcggtcggttattc

SEQ ID NO: 6047 - DNA, 27 bp, Artificial Sequence
  Description of Artificial Sequence: Synthetic oligonucleotide
ggtcggcgtttatgacggtgaggaagt

SEQ ID NO: 6048 - DNA, 26 bp, Artificial Sequence
  Description of Artificial Sequence: Synthetic oligonucleotide
ataattggtatagttatcgttagcgg

SEQ ID NO: 6049 - DNA, 19 bp, Artificial Sequence
  Description of Artificial Sequence: Synthetic oligonucleotide
ccgactcctctaccctcgt

SEQ ID NO: 6050 - DNA, 24 bp, Artificial Sequence
  Description of Artificial Sequence: Synthetic oligonucleotide
atataaaaataaacgcgacgatca

SEQ ID NO: 6051 - DNA, 19 bp, Artificial Sequence
  Description of Artificial Sequence: Synthetic oligonucleotide
atccgcgacgacattaaac

SEQ ID NO: 6052 - DNA, 31 bp, Artificial Sequence
  Description of Artificial Sequence: Synthetic oligonucleotide
ggatttgttcgcggacgttcgttttagtttt

SEQ ID NO: 6053 - DNA, 23 bp, Artificial Sequence
  Description of Artificial Sequence: Synthetic oligonucleotide
ttagtcgtatggtatgtagtcgg

SEQ ID NO: 6054 - DNA, 19 bp, Artificial Sequence
  Description of Artificial Sequence: Synthetic oligonucleotide
taggtgcggtcggttattc

SEQ ID NO: 6055 - DNA, 22 bp, Artificial Sequence
  Description of Artificial Sequence: Synthetic oligonucleotide
atattaaccactacgaaatcgc

SEQ ID NO: 6056 - DNA, 24 bp, Artificial Sequence
  Description of Artificial Sequence: Synthetic oligonucleotide
tttttatacggttaggtttatcgc

SEQ ID NO: 6057 - DNA, 28 bp, Artificial Sequence
  Description of Artificial Sequence: Synthetic oligonucleotide
ggcgttgtaggtgcggtcggttattcgg

SEQ ID NO: 6058 - DNA, 21 bp, Artificial Sequence
  Description of Artificial Sequence: Synthetic oligonucleotide
gttgttcgttagatttacggc

SEQ ID NO: 6059 - DNA, 22 bp, Artificial Sequence
  Description of Artificial Sequence: Synthetic oligonucleotide
acgccgctaacgataactatac

SEQ ID NO: 6060 - DNA, 18 bp, Artificial Sequence
  Description of Artificial Sequence: Synthetic oligonucleotide
gtgacggtttttatgcgg

SEQ ID NO: 6061 - DNA, 32 bp, Artificial Sequence
  Description of Artificial Sequence: Synthetic oligonucleotide
tacggcggagttgttcgttagatttacggcgt

SEQ ID NO: 6062 - DNA, 18 bp, Artificial Sequence
  Description of Artificial Sequence: Synthetic oligonucleotide
ggtgacggtttttatgcg

SEQ ID NO: 6063 - DNA, 22 bp, Artificial Sequence
  Description of Artificial Sequence: Synthetic oligonucleotide
gccgctaacgataactatacca

SEQ ID NO: 6064 - DNA, 20 bp, Artificial Sequence
  Description of Artificial Sequence: Synthetic oligonucleotide
acgcgacgatcaaaacaata

SEQ ID NO: 6065 - DNA, 20 bp, Artificial Sequence
  Description of Artificial Sequence: Synthetic oligonucleotide
aaatccgtacaaaaccgaac

SEQ ID NO: 6066 - DNA, 19 bp, Artificial Sequence
  Description of Artificial Sequence: Synthetic oligonucleotide
tggagtagtttagcgtcgg

SEQ ID NO: 6067 - DNA, 19 bp, Artificial Sequence
  Description of Artificial Sequence: Synthetic oligonucleotide
acaaaaccgacgccaatac

SEQ ID NO: 6068 - DNA, 23 bp, Artificial Sequence
  Description of Artificial Sequence: Synthetic oligonucleotide
cgaagtttagtacgagcgtgtag

SEQ ID NO: 6069 - DNA, 32 bp, Artificial Sequence
  Description of Artificial Sequence: Synthetic oligonucleotide
attagaaggtttcgggttgcggaaagattagt

SEQ ID NO: 6070 - DNA, 22 bp, Artificial Sequence
  Description of Artificial Sequence: Synthetic oligonucleotide
tatctacgcgataatctacgcc

SEQ ID NO: 6071 - DNA, 32 bp, Artificial Sequence
  Description of Artificial Sequence: Synthetic oligonucleotide
agtaatacgtatagtacggcggagttgttcgt

SEQ ID NO: 6072 - DNA, 19 bp, Artificial Sequence
  Description of Artificial Sequence: Synthetic oligonucleotide
cgcgacgatcaaaacaata

SEQ ID NO: 6073 - DNA, 20 bp, Artificial Sequence
  Description of Artificial Sequence: Synthetic oligonucleotide
atcgtcacactcgtcgtact

SEQ ID NO: 6074 - DNA, 19 bp, Artificial Sequence
  Description of Artificial Sequence: Synthetic oligonucleotide
ttgagacgtttgtcggttg

SEQ ID NO: 6075 - DNA, 19 bp, Artificial Sequence
  Description of Artificial Sequence: Synthetic oligonucleotide
caaatcgccgactcctcta

SEQ ID NO: 6076 - DNA, 23 bp, Artificial Sequence
  Description of Artificial Sequence: Synthetic oligonucleotide
ttttatacggttaggtttatcgc

SEQ ID NO: 6077 - DNA, 22 bp, Artificial Sequence
  Description of Artificial Sequence: Synthetic oligonucleotide
actcatcgtaactatcgaccaa

SEQ ID NO: 6078 - DNA, 22 bp, Artificial Sequence
  Description of Artificial Sequence: Synthetic oligonucleotide
acgtactaatctttccgcaacc

SEQ ID NO: 6079 - DNA, 23 bp, Artificial Sequence
  Description of Artificial Sequence: Synthetic oligonucleotide
agtcgtatggtatgtagtcggta

SEQ ID NO: 6080 - DNA, 33 bp, Artificial Sequence
  Description of Artificial Sequence: Synthetic oligonucleotide
atttggcgttttttaaggacgttttacggagtt

SEQ ID NO: 6081 - DNA, 20 bp, Artificial Sequence
  Description of Artificial Sequence: Synthetic oligonucleotide
aatccgcgacgacattaaac

SEQ ID NO: 6082 - DNA, 35 bp, Artificial Sequence
  Description of Artificial Sequence: Synthetic oligonucleotide
gatttgttcgcggacgttcgttttagttttttaag

SEQ ID NO: 6083 - DNA, 24 bp, Artificial Sequence
  Description of Artificial Sequence: Synthetic oligonucleotide
tattggtcgatagttacgatgagt

SEQ ID NO: 6084 - DNA, 19 bp, Artificial Sequence
  Description of Artificial Sequence: Synthetic oligonucleotide
cgcgttggagtagtttagc

SEQ ID NO: 6085 - DNA, 22 bp, Artificial Sequence
  Description of Artificial Sequence: Synthetic oligonucleotide
aagatttttatcgcgtgtttgt

SEQ ID NO: 6086 - DNA, 22 bp, Artificial Sequence
  Description of Artificial Sequence: Synthetic oligonucleotide
aatctacgctacgttcaccact

SEQ ID NO: 6087 - DNA, 40 bp, Artificial Sequence
  Description of Artificial Sequence: Synthetic oligonucleotide
ttcgtacgtggttatagttaacgtttgttgcgtttcgcgt

SEQ ID NO: 6088 - DNA, 22 bp, Artificial Sequence
  Description of Artificial Sequence: Synthetic oligonucleotide
atctacgctacgttcaccactc

SEQ ID NO: 6089 - DNA, 22 bp, Artificial Sequence
  Description of Artificial Sequence: Synthetic oligonucleotide
ggtaagatttttatcgcgtgtt

SEQ ID NO: 6090 - DNA, 22 bp, Artificial Sequence
  Description of Artificial Sequence: Synthetic oligonucleotide
atcgtagtttgcgtgtttaagg

SEQ ID NO: 6091 - DNA, 22 bp, Artificial Sequence
  Description of Artificial Sequence: Synthetic oligonucleotide
gcgaataaaaccgaacaaatta

SEQ ID NO: 6092 - DNA, 36 bp, Artificial Sequence
  Description of Artificial Sequence: Synthetic oligonucleotide
gttcgtcgtttattttatttgggtcgacgagattaa

SEQ ID NO: 6093 - DNA, 22 bp, Artificial Sequence
  Description of Artificial Sequence: Synthetic oligonucleotide
agtggtgaacgtagcgtagatt

SEQ ID NO: 6094 - DNA, 22 bp, Artificial Sequence
  Description of Artificial Sequence: Synthetic oligonucleotide
acgaccgtaacgataataaacc

SEQ ID NO: 6095 - DNA, 30 bp, Artificial Sequence
  Description of Artificial Sequence: Synthetic oligonucleotide
gtttttcggggttgttcgtgtcgtagaagt

SEQ ID NO: 6096 - DNA, 22 bp, Artificial Sequence
  Description of Artificial Sequence: Synthetic oligonucleotide
taagatttttatcgcgtgtttg

SEQ ID NO: 6097 - DNA, 22 bp, Artificial Sequence
  Description of Artificial Sequence: Synthetic oligonucleotide
cgaccgtaacgataataaacca

SEQ ID NO: 6098 - DNA, 23 bp, Artificial Sequence
  Description of Artificial Sequence: Synthetic oligonucleotide
gtaagatttttatcgcgtgtttg

SEQ ID NO: 6099 - DNA, 22 bp, Artificial Sequence
  Description of Artificial Sequence: Synthetic oligonucleotide
taatctacgctacgttcaccac

SEQ ID NO: 6100 - DNA, 22 bp, Artificial Sequence
  Description of Artificial Sequence: Synthetic oligonucleotide
cgtgttgggtttattttacgtt

SEQ ID NO: 6101 - DNA, 21 bp, Artificial Sequence
  Description of Artificial Sequence: Synthetic oligonucleotide
cgtcttcattctcctcgtaca

SEQ ID NO: 6102 - DNA, 36 bp, Artificial Sequence
  Description of Artificial Sequence: Synthetic oligonucleotide
tgtgtgttgttatatcggtaagatttttatcgcgtg

SEQ ID NO: 6103 - DNA, 21 bp, Artificial Sequence
  Description of Artificial Sequence: Synthetic oligonucleotide
acaacacgaccgtaacgataa

SEQ ID NO: 6104 - DNA, 29 bp, Artificial Sequence
  Description of Artificial Sequence: Synthetic oligonucleotide
ggggttgttcgtgtcgtagaagttttggt

SEQ ID NO: 6105 - DNA, 21 bp, Artificial Sequence
  Description of Artificial Sequence: Synthetic oligonucleotide
tctacgctacgttcaccactc

SEQ ID NO: 6106 - DNA, 22 bp, Artificial Sequence
  Description of Artificial Sequence: Synthetic oligonucleotide
gagtggtgaacgtagcgtagat

SEQ ID NO: 6107 - DNA, 32 bp, Artificial Sequence
  Description of Artificial Sequence: Synthetic oligonucleotide
atcgagttggtgatgacgtgtattttgtacgt

SEQ ID NO: 6108 - DNA, 23 bp, Artificial Sequence
  Description of Artificial Sequence: Synthetic oligonucleotide
aacacgaccgtaacgataataaa

SEQ ID NO: 6109 - DNA, 30 bp, Artificial Sequence
  Description of Artificial Sequence: Synthetic oligonucleotide
tttcggggttgttcgtgtcgtagaagtttt

SEQ ID NO: 6110 - DNA, 21 bp, Artificial Sequence
  Description of Artificial Sequence: Synthetic oligonucleotide
tcgtagtttgcgtgtttaagg

SEQ ID NO: 6111 - DNA, 22 bp, Artificial Sequence
  Description of Artificial Sequence: Synthetic oligonucleotide
taatttgttcggttttattcgc

SEQ ID NO: 6112 - DNA, 21 bp, Artificial Sequence
  Description of Artificial Sequence: Synthetic oligonucleotide
aaacgcgactaccttcctaaa

SEQ ID NO: 6113 - DNA, 28 bp, Artificial Sequence
  Description of Artificial Sequence: Synthetic oligonucleotide
gtcgttgtcgaggtgttggagaagtcgt

SEQ ID NO: 6114 - DNA, 22 bp, Artificial Sequence
  Description of Artificial Sequence: Synthetic oligonucleotide
agatttttatcgcgtgtttgta

SEQ ID NO: 6115 - DNA, 23 bp, Artificial Sequence
  Description of Artificial Sequence: Synthetic oligonucleotide
gataatctacgctacgttcacca

SEQ ID NO: 6116 - DNA, 22 bp, Artificial Sequence
  Description of Artificial Sequence: Synthetic oligonucleotide
aacaacacgaccgtaacgataa

SEQ ID NO: 6117 - DNA, 22 bp, Artificial Sequence
  Description of Artificial Sequence: Synthetic oligonucleotide
ataatctacgctacgttcacca

SEQ ID NO: 6118 - DNA, 22 bp, Artificial Sequence
  Description of Artificial Sequence: Synthetic oligonucleotide
atgacgtgtattttgtacgtgg

SEQ ID NO: 6119 - DNA, 23 bp, Artificial Sequence
  Description of Artificial Sequence: Synthetic oligonucleotide
taatctacgctacgttcaccact

SEQ ID NO: 6120 - DNA, 22 bp, Artificial Sequence
  Description of Artificial Sequence: Synthetic oligonucleotide
acacgaccgtaacgataataaa

SEQ ID NO: 6121 - DNA, 23 bp, Artificial Sequence
  Description of Artificial Sequence: Synthetic oligonucleotide
tatcgtagtttgcgtgtttaagg

SEQ ID NO: 6122 - DNA, 23 bp, Artificial Sequence
  Description of Artificial Sequence: Synthetic oligonucleotide
gaccgtaacgataataaaccaaa

SEQ ID NO: 6123 - DNA, 22 bp, Artificial Sequence
  Description of Artificial Sequence: Synthetic oligonucleotide
ccgtaacgataataaaccaaaa

SEQ ID NO: 6124 - DNA, 32 bp, Artificial Sequence
  Description of Artificial Sequence: Synthetic oligonucleotide
aatagtttttcggggttgttcgtgtcgtagaa

SEQ ID NO: 6125 - DNA, 22 bp, Artificial Sequence
  Description of Artificial Sequence: Synthetic oligonucleotide
cacgaccgtaacgataataaac

SEQ ID NO: 6126 - DNA, 23 bp, Artificial Sequence
  Description of Artificial Sequence: Synthetic oligonucleotide
caacacgaccgtaacgataataa

SEQ ID NO: 6127 - DNA, 23 bp, Artificial Sequence
  Description of Artificial Sequence: Synthetic oligonucleotide
ggtaagatttttatcgcgtgttt

SEQ ID NO: 6128 - DNA, 23 bp, Artificial Sequence
  Description of Artificial Sequence: Synthetic oligonucleotide
accgtaacgataataaaccaaaa

SEQ ID NO: 6129 - DNA, 30 bp, Artificial Sequence
  Description of Artificial Sequence: Synthetic oligonucleotide
agtttttcggggttgttcgtgtcgtagaag

SEQ ID NO: 6130 - DNA, 21 bp, Artificial Sequence
  Description of Artificial Sequence: Synthetic oligonucleotide
gtacgaggagaatgaagacgg

SEQ ID NO: 6131 - DNA, 22 bp, Artificial Sequence
  Description of Artificial Sequence: Synthetic oligonucleotide
tcgataatctacgctacgttca

SEQ ID NO: 6132 - DNA, 20 bp, Artificial Sequence
  Description of Artificial Sequence: Synthetic oligonucleotide
ccgtcttcattctcctcgta

SEQ ID NO: 6133 - DNA, 21 bp, Artificial Sequence
  Description of Artificial Sequence: Synthetic oligonucleotide
tgtacgaggagaatgaagacg

SEQ ID NO: 6134 - DNA, 22 bp, Artificial Sequence
  Description of Artificial Sequence: Synthetic oligonucleotide
caactcgataatctacgctacg

SEQ ID NO: 6135 - DNA, 21 bp, Artificial Sequence
  Description of Artificial Sequence: Synthetic oligonucleotide
aatttgttcggttttattcgc

SEQ ID NO: 6136 - DNA, 22 bp, Artificial Sequence
  Description of Artificial Sequence: Synthetic oligonucleotide
tcaccaactcgataatctacgc

SEQ ID NO: 6137 - DNA, 22 bp, Artificial Sequence
  Description of Artificial Sequence: Synthetic oligonucleotide
ttattttgtacggcggttattt

SEQ ID NO: 6138 - DNA, 22 bp, Artificial Sequence
  Description of Artificial Sequence: Synthetic oligonucleotide
attacggataatttgttcggtt

SEQ ID NO: 6139 - DNA, 21 bp, Artificial Sequence
  Description of Artificial Sequence: Synthetic oligonucleotide
acgcgactaccttcctaaaaa

SEQ ID NO: 6140 - DNA, 33 bp, Artificial Sequence
  Description of Artificial Sequence: Synthetic oligonucleotide
tattttttgtcgttgtcgaggtgttggagaagt

SEQ ID NO: 6141 - DNA, 21 bp, Artificial Sequence
  Description of Artificial Sequence: Synthetic oligonucleotide
cgtgtttgtacgaggagaatg

SEQ ID NO: 6142 - DNA, 21 bp, Artificial Sequence
  Description of Artificial Sequence: Synthetic oligonucleotide
acgtcatcaccaactcgataa

SEQ ID NO: 6143 - DNA, 20 bp, Artificial Sequence
  Description of Artificial Sequence: Synthetic oligonucleotide
tacgaggagaatgaagacgg

SEQ ID NO: 6144 - DNA, 23 bp, Artificial Sequence
  Description of Artificial Sequence: Synthetic oligonucleotide
cgaataaaaccgaacaaattatc

SEQ ID NO: 6145 - DNA, 22 bp, Artificial Sequence
  Description of Artificial Sequence: Synthetic oligonucleotide
cgttaagttacgtttttcgggt

SEQ ID NO: 6146 - DNA, 22 bp, Artificial Sequence
  Description of Artificial Sequence: Synthetic oligonucleotide
caaataaccgccgtacaaaata

SEQ ID NO: 6147 - DNA, 26 bp, Artificial Sequence
  Description of Artificial Sequence: Synthetic oligonucleotide
aagttcgttgagcgttcgcgtttggt

SEQ ID NO: 6148 - DNA, 22 bp, Artificial Sequence
  Description of Artificial Sequence: Synthetic oligonucleotide
ttgtacgaggagaatgaagacg

SEQ ID NO: 6149 - DNA, 23 bp, Artificial Sequence
  Description of Artificial Sequence: Synthetic oligonucleotide
caccaactcgataatctacgcta

SEQ ID NO: 6150 - DNA, 23 bp, Artificial Sequence
  Description of Artificial Sequence: Synthetic oligonucleotide
cggataatttgttcggttttatt

SEQ ID NO: 6151 - DNA, 21 bp, Artificial Sequence
  Description of Artificial Sequence: Synthetic oligonucleotide
cgagttggtgatgacgtgtat

SEQ ID NO: 6152 - DNA, 23 bp, Artificial Sequence
  Description of Artificial Sequence: Synthetic oligonucleotide
tgatgacgtgtattttgtacgtg

SEQ ID NO: 6153 - DNA, 23 bp, Artificial Sequence
  Description of Artificial Sequence: Synthetic oligonucleotide
ataatttgttcggttttattcgc

SEQ ID NO: 6154 - DNA, 22 bp, Artificial Sequence
  Description of Artificial Sequence: Synthetic oligonucleotide
gtggtgaacgtagcgtagatta

SEQ ID NO: 6155 - DNA, 23 bp, Artificial Sequence
  Description of Artificial Sequence: Synthetic oligonucleotide
cacgaccgtaacgataataaacc

SEQ ID NO: 6156 - DNA, 20 bp, Artificial Sequence
  Description of Artificial Sequence: Synthetic oligonucleotide
ttttcggtttgttatagcgg

SEQ ID NO: 6157 - DNA, 22 bp, Artificial Sequence
  Description of Artificial Sequence: Synthetic oligonucleotide
acgcgaaatacgacacataaat

SEQ ID NO: 6158 - DNA, 33 bp, Artificial Sequence
  Description of Artificial Sequence: Synthetic oligonucleotide
ttgcgcgttcgtcgtttttacgttgtttatggt

SEQ ID NO: 6159 - DNA, 21 bp, Artificial Sequence
  Description of Artificial Sequence: Synthetic oligonucleotide
tttttcggtttgttatagcgg

SEQ ID NO: 6160 - DNA, 24 bp, Artificial Sequence
  Description of Artificial Sequence: Synthetic oligonucleotide
cgtatatcgtagtttgcgtgttta

SEQ ID NO: 6161 - DNA, 22 bp, Artificial Sequence
  Description of Artificial Sequence: Synthetic oligonucleotide
aaaaccgaacaaattatccgta

SEQ ID NO: 6162 - DNA, 22 bp, Artificial Sequence
  Description of Artificial Sequence: Synthetic oligonucleotide
gttattttgtacggcggttatt

SEQ ID NO: 6163 - DNA, 20 bp, Artificial Sequence
  Description of Artificial Sequence: Synthetic oligonucleotide
tttatcgaattaacgcggag

SEQ ID NO: 6164 - DNA, 22 bp, Artificial Sequence
  Description of Artificial Sequence: Synthetic oligonucleotide
gacgacaaaacgcactaaacta

SEQ ID NO: 6165 - DNA, 27 bp, Artificial Sequence
  Description of Artificial Sequence: Synthetic oligonucleotide
gggcgagttttcgtcgcgtttttgcgt

SEQ ID NO: 6166 - DNA, 21 bp, Artificial Sequence
  Description of Artificial Sequence: Synthetic oligonucleotide
gtggtgaacgtagcgtagatt

SEQ ID NO: 6167 - DNA, 21 bp, Artificial Sequence
  Description of Artificial Sequence: Synthetic oligonucleotide
cgtagtttgcgtgtttaaggg

SEQ ID NO: 6168 - DNA, 20 bp, Artificial Sequence
  Description of Artificial Sequence: Synthetic oligonucleotide
aattaacgcggaggattagg

SEQ ID NO: 6169 - DNA, 21 bp, Artificial Sequence
  Description of Artificial Sequence: Synthetic oligonucleotide
tgacgtgtattttgtacgtgg

SEQ ID NO: 6170 - DNA, 24 bp, Artificial Sequence
  Description of Artificial Sequence: Synthetic oligonucleotide
atatcgtagtttgcgtgtttaagg

SEQ ID NO: 6171 - DNA, 22 bp, Artificial Sequence
  Description of Artificial Sequence: Synthetic oligonucleotide
cgtatatcgtagtttgcgtgtt

SEQ ID NO: 6172 - DNA, 22 bp, Artificial Sequence
  Description of Artificial Sequence: Synthetic oligonucleotide
tattttgtacggcggttatttg

SEQ ID NO: 6173 - DNA, 22 bp, Artificial Sequence
  Description of Artificial Sequence: Synthetic oligonucleotide
aacacgaccgtaacgataataa

SEQ ID NO: 6174 - DNA, 23 bp, Artificial Sequence
  Description of Artificial Sequence: Synthetic oligonucleotide
cgaacaaattatccgtaataacc

SEQ ID NO: 6175 - DNA, 23 bp, Artificial Sequence
  Description of Artificial Sequence: Synthetic oligonucleotide
gataatttgttcggttttattcg

SEQ ID NO: 6176 - DNA, 21 bp, Artificial Sequence
  Description of Artificial Sequence: Synthetic oligonucleotide
aacgcgactaccttcctaaaa

SEQ ID NO: 6177 - DNA, 21 bp, Artificial Sequence
  Description of Artificial Sequence: Synthetic oligonucleotide
ttttaggaaggtagtcgcgtt

SEQ ID NO: 6178 - DNA, 24 bp, Artificial Sequence
  Description of Artificial Sequence: Synthetic oligonucleotide
cgaaatacgacacataaataacca

SEQ ID NO: 6179 - DNA, 22 bp, Artificial Sequence
  Description of Artificial Sequence: Synthetic oligonucleotide
agcggcgacgggcgtttgaagt

SEQ ID NO: 6180 - DNA, 21 bp, Artificial Sequence
  Description of Artificial Sequence: Synthetic oligonucleotide
tttttaggaaggtagtcgcgt

SEQ ID NO: 6181 - DNA, 22 bp, Artificial Sequence
  Description of Artificial Sequence: Synthetic oligonucleotide
ccaactcgataatctacgctac

SEQ ID NO: 6182 - DNA, 22 bp, Artificial Sequence
  Description of Artificial Sequence: Synthetic oligonucleotide
accaactcgataatctacgcta

SEQ ID NO: 6183 - DNA, 20 bp, Artificial Sequence
  Description of Artificial Sequence: Synthetic oligonucleotide
tttttcggcggtttagattt

SEQ ID NO: 6184 - DNA, 22 bp, Artificial Sequence
  Description of Artificial Sequence: Synthetic oligonucleotide
aacgctcaacgaacttaacaac

SEQ ID NO: 6185 - DNA, 33 bp, Artificial Sequence
  Description of Artificial Sequence: Synthetic oligonucleotide
ttcgggttatagcgttaagttacgtttttcggg

SEQ ID NO: 6186 - DNA, 22 bp, Artificial Sequence
  Description of Artificial Sequence: Synthetic oligonucleotide
acgacaaaacgcactaaactaa

SEQ ID NO: 6187 - DNA, 23 bp, Artificial Sequence
  Description of Artificial Sequence: Synthetic oligonucleotide
tattacggataatttgttcggtt

SEQ ID NO: 6188 - DNA, 22 bp, Artificial Sequence
  Description of Artificial Sequence: Synthetic oligonucleotide
tatcgtagtttgcgtgtttaag

SEQ ID NO: 6189 - DNA, 20 bp, Artificial Sequence
  Description of Artificial Sequence: Synthetic oligonucleotide
aaaaacgcgactaccttcct

SEQ ID NO: 6190 - DNA, 22 bp, Artificial Sequence
  Description of Artificial Sequence: Synthetic oligonucleotide
tagcgttaagttacgtttttcg

SEQ ID NO: 6191 - DNA, 21 bp, Artificial Sequence
  Description of Artificial Sequence: Synthetic oligonucleotide
caaataaccgccgtacaaaat

SEQ ID NO: 6192 - DNA, 20 bp, Artificial Sequence
  Description of Artificial Sequence: Synthetic oligonucleotide
caacacgaccgtaacgataa

SEQ ID NO: 6193 - DNA, 22 bp, Artificial Sequence
  Description of Artificial Sequence: Synthetic oligonucleotide
gttaagttacgtttttcgggtt

SEQ ID NO: 6194 - DNA, 22 bp, Artificial Sequence
  Description of Artificial Sequence: Synthetic oligonucleotide
gatgacgtgtattttgtacgtg

SEQ ID NO: 6195 - DNA, 21 bp, Artificial Sequence
  Description of Artificial Sequence: Synthetic oligonucleotide
tatcgagttggtgatgacgtg

SEQ ID NO: 6196 - DNA, 19 bp, Artificial Sequence
  Description of Artificial Sequence: Synthetic oligonucleotide
ggtttgttatagcggcgac

SEQ ID NO: 6197 - DNA, 22 bp, Artificial Sequence
  Description of Artificial Sequence: Synthetic oligonucleotide
cgcgaaatacgacacataaata

SEQ ID NO: 6198 - DNA, 22 bp, Artificial Sequence
  Description of Artificial Sequence: Synthetic oligonucleotide
atttttatcgcgtgtttgtacg

SEQ ID NO: 6199 - DNA, 22 bp, Artificial Sequence
  Description of Artificial Sequence: Synthetic oligonucleotide
gataatctacgctacgttcacc

SEQ ID NO: 6200 - DNA, 23 bp, Artificial Sequence
  Description of Artificial Sequence: Synthetic oligonucleotide
ctcgataatctacgctacgttca

SEQ ID NO: 6201 - DNA, 21 bp, Artificial Sequence
  Description of Artificial Sequence: Synthetic oligonucleotide
gatttttatcgcgtgtttgta

SEQ ID NO: 6202 - DNA, 24 bp, Artificial Sequence
  Description of Artificial Sequence: Synthetic oligonucleotide
cgttttatagggtatgttcgtgtt

SEQ ID NO: 6203 - DNA, 36 bp, Artificial Sequence
  Description of Artificial Sequence: Synthetic oligonucleotide
gtcgtcgttgtgtgttgttatatcggtaagattttt

SEQ ID NO: 6204 - DNA, 19 bp, Artificial Sequence
  Description of Artificial Sequence: Synthetic oligonucleotide
acgaggagaatgaagacgg

SEQ ID NO: 6205 - DNA, 20 bp, Artificial Sequence
  Description of Artificial Sequence: Synthetic oligonucleotide
aacgcgactaccttcctaaa

SEQ ID NO: 6206 - DNA, 23 bp, Artificial Sequence
  Description of Artificial Sequence: Synthetic oligonucleotide
atcaccaactcgataatctacgc

SEQ ID NO: 6207 - DNA, 19 bp, Artificial Sequence
  Description of Artificial Sequence: Synthetic oligonucleotide
taagttcgttgagcgttcg

SEQ ID NO: 6208 - DNA, 22 bp, Artificial Sequence
  Description of Artificial Sequence: Synthetic oligonucleotide
aaataaccgccgtacaaaataa

SEQ ID NO: 6209 - DNA, 38 bp, Artificial Sequence
  Description of Artificial Sequence: Synthetic oligonucleotide
ttttatagggtatgttcgtgttgggtttattttacgtt

SEQ ID NO: 6210 - DNA, 19 bp, Artificial Sequence
  Description of Artificial Sequence: Synthetic oligonucleotide
gacgcgaataaaaccgaac

SEQ ID NO: 6211 - DNA, 21 bp, Artificial Sequence
  Description of Artificial Sequence: Synthetic oligonucleotide
cgtatatcgtagtttgcgtgt

SEQ ID NO: 6212 - DNA, 22 bp, Artificial Sequence
  Description of Artificial Sequence: Synthetic oligonucleotide
cgttttatagggtatgttcgtg

SEQ ID NO: 6213 - DNA, 22 bp, Artificial Sequence
  Description of Artificial Sequence: Synthetic oligonucleotide
cgacaaaacgcactaaactaat

SEQ ID NO: 6214 - DNA, 20 bp, Artificial Sequence
  Description of Artificial Sequence: Synthetic oligonucleotide
cgagttggtgatgacgtgta

SEQ ID NO: 6215 - DNA, 21 bp, Artificial Sequence
  Description of Artificial Sequence: Synthetic oligonucleotide
gaattaacgcggaggattagg

SEQ ID NO: 6216 - DNA, 23 bp, Artificial Sequence
  Description of Artificial Sequence: Synthetic oligonucleotide
tcgtgttgggtttattttacgtt

SEQ ID NO: 6217 - DNA, 37 bp, Artificial Sequence
  Description of Artificial Sequence: Synthetic oligonucleotide
gttgtgtgttgttatatcggtaagatttttatcgcgt

SEQ ID NO: 6218 - DNA, 20 bp, Artificial Sequence
  Description of Artificial Sequence: Synthetic oligonucleotide
tatcgcgtgtttgtacgagg

SEQ ID NO: 6219 - DNA, 23 bp, Artificial Sequence
  Description of Artificial Sequence: Synthetic oligonucleotide
atatcgtagtttgcgtgtttaag

SEQ ID NO: 6220 - DNA, 21 bp, Artificial Sequence
  Description of Artificial Sequence: Synthetic oligonucleotide
ttacggataatttgttcggtt

SEQ ID NO: 6221 - DNA, 23 bp, Artificial Sequence
  Description of Artificial Sequence: Synthetic oligonucleotide
aactcgataatctacgctacgtt

SEQ ID NO: 6222 - DNA, 19 bp, Artificial Sequence
  Description of Artificial Sequence: Synthetic oligonucleotide
cgagttggtgatgacgtgt

SEQ ID NO: 6223 - DNA, 21 bp, Artificial Sequence
  Description of Artificial Sequence: Synthetic oligonucleotide
gctcaacgaacttaacaacga

SEQ ID NO: 6224 - DNA, 21 bp, Artificial Sequence
  Description of Artificial Sequence: Synthetic oligonucleotide
gaacgctcaacgaacttaaca

SEQ ID NO: 6225 - DNA, 22 bp, Artificial Sequence
  Description of Artificial Sequence: Synthetic oligonucleotide
ataatttgttcggttttattcg

SEQ ID NO: 6226 - DNA, 22 bp, Artificial Sequence
  Description of Artificial Sequence: Synthetic oligonucleotide
gtatttgtagcgtgttcggttt

SEQ ID NO: 6227 - DNA, 19 bp, Artificial Sequence
  Description of Artificial Sequence: Synthetic oligonucleotide
gacgaaaactcgcccttac

SEQ ID NO: 6228 - DNA, 34 bp, Artificial Sequence
  Description of Artificial Sequence: Synthetic oligonucleotide
gagggttttatcgaagtttatcgaattaacgcgg

SEQ ID NO: 6229 - DNA, 25 bp, Artificial Sequence
  Description of Artificial Sequence: Synthetic oligonucleotide
cgtaacgataataaaccaaaacttc

SEQ ID NO: 6230 - DNA, 23 bp, Artificial Sequence
  Description of Artificial Sequence: Synthetic oligonucleotide
atagcgttaagttacgtttttcg

SEQ ID NO: 6231 - DNA, 23 bp, Artificial Sequence
  Description of Artificial Sequence: Synthetic oligonucleotide
taaaaccgaacaaattatccgta

SEQ ID NO: 6232 - DNA, 24 bp, Artificial Sequence
  Description of Artificial Sequence: Synthetic oligonucleotide
gaccgtaacgataataaaccaaaa

SEQ ID NO: 6233 - DNA, 24 bp, Artificial Sequence
  Description of Artificial Sequence: Synthetic oligonucleotide
gcgaaatacgacacataaataacc

SEQ ID NO: 6234 - DNA, 20 bp, Artificial Sequence
  Description of Artificial Sequence: Synthetic oligonucleotide
tacgctacgttcaccactcg

SEQ ID NO: 6235 - DNA, 21 bp, Artificial Sequence
  Description of Artificial Sequence: Synthetic oligonucleotide
attttgtacggcggttatttg

SEQ ID NO: 6236 - DNA, 19 bp, Artificial Sequence
  Description of Artificial Sequence: Synthetic oligonucleotide
accacgacgcgaataaaac

SEQ ID NO: 6237 - DNA, 21 bp, Artificial Sequence
  Description of Artificial Sequence: Synthetic oligonucleotide
aaataaccgccgtacaaaata

SEQ ID NO: 6238 - DNA, 20 bp, Artificial Sequence
  Description of Artificial Sequence: Synthetic oligonucleotide
cgcgactaccttcctaaaaa

SEQ ID NO: 6239 - DNA, 25 bp, Artificial Sequence
  Description of Artificial Sequence: Synthetic oligonucleotide
tatatcgtagtttgcgtgtttaagg

SEQ ID NO: 6240 - DNA, 20 bp, Artificial Sequence
  Description of Artificial Sequence: Synthetic oligonucleotide
ctacgctacgttcaccactc

SEQ ID NO: 6241 - DNA, 24 bp, Artificial Sequence
  Description of Artificial Sequence: Synthetic oligonucleotide
ttattacggataatttgttcggtt

SEQ ID NO: 6242 - DNA, 20 bp, Artificial Sequence
  Description of Artificial Sequence: Synthetic oligonucleotide
ttaagttcgttgagcgttcg

SEQ ID NO: 6243 - DNA, 20 bp, Artificial Sequence
  Description of Artificial Sequence: Synthetic oligonucleotide
aggaaggtagtcgcgttttt

SEQ ID NO: 6244 - DNA, 19 bp, Artificial Sequence
  Description of Artificial Sequence: Synthetic oligonucleotide
ttttcggcggtttagattt

SEQ ID NO: 6245 - DNA, 21 bp, Artificial Sequence
  Description of Artificial Sequence: Synthetic oligonucleotide
tttttatcgcgtgtttgtacg

SEQ ID NO: 6246 - DNA, 20 bp, Artificial Sequence
  Description of Artificial Sequence: Synthetic oligonucleotide
cgtcatcaccaactcgataa

SEQ ID NO: 6247 - DNA, 22 bp, Artificial Sequence
  Description of Artificial Sequence: Synthetic oligonucleotide
tcgacgagattaaggaggttat

SEQ ID NO: 6248 - DNA, 19 bp, Artificial Sequence
  Description of Artificial Sequence: Synthetic oligonucleotide
cacctcgacaacgacaaaa

SEQ ID NO: 6249 - DNA, 32 bp, Artificial Sequence
  Description of Artificial Sequence: Synthetic oligonucleotide
gataatttgttcggttttattcgcgtcgtggt

SEQ ID NO: 6250 - DNA, 21 bp, Artificial Sequence
  Description of Artificial Sequence: Synthetic oligonucleotide
tttatcgcgtgtttgtacgag

SEQ ID NO: 6251 - DNA, 22 bp, Artificial Sequence
  Description of Artificial Sequence: Synthetic oligonucleotide
actcgataatctacgctacgtt

SEQ ID NO: 6252 - DNA, 24 bp, Artificial Sequence
  Description of Artificial Sequence: Synthetic oligonucleotide
acggataatttgttcggttttatt

SEQ ID NO: 6253 - DNA, 23 bp, Artificial Sequence
  Description of Artificial Sequence: Synthetic oligonucleotide
cgcgaaatacgacacataaataa

SEQ ID NO: 6254 - DNA, 20 bp, Artificial Sequence
  Description of Artificial Sequence: Synthetic oligonucleotide
atttgttcggttttattcgc

SEQ ID NO: 6255 - DNA, 19 bp, Artificial Sequence
  Description of Artificial Sequence: Synthetic oligonucleotide
gctacgttcaccactcgac

SEQ ID NO: 6256 - DNA, 19 bp, Artificial Sequence
  Description of Artificial Sequence: Synthetic oligonucleotide
acacctcgacaacgacaaa

SEQ ID NO: 6257 - DNA, 19 bp, Artificial Sequence
  Description of Artificial Sequence: Synthetic oligonucleotide
aacacctcgacaacgacaa

SEQ ID NO: 6258 - DNA, 22 bp, Artificial Sequence
  Description of Artificial Sequence: Synthetic oligonucleotide
cacgaacataccctataaaacg

SEQ ID NO: 6259 - DNA, 18 bp, Artificial Sequence
  Description of Artificial Sequence: Synthetic oligonucleotide
acgggcgtttgaagtttt

SEQ ID NO: 6260 - DNA, 20 bp, Artificial Sequence
  Description of Artificial Sequence: Synthetic oligonucleotide
atcgagttggtgatgacgtg

SEQ ID NO: 6261 - DNA, 22 bp, Artificial Sequence
  Description of Artificial Sequence: Synthetic oligonucleotide
gacgtgtattttgtacgtggtg

SEQ ID NO: 6262 - DNA, 26 bp, Artificial Sequence
  Description of Artificial Sequence: Synthetic oligonucleotide
aacgataataaaccaaaacttctacg

SEQ ID NO: 6263 - DNA, 33 bp, Artificial Sequence
  Description of Artificial Sequence: Synthetic oligonucleotide
tgtataatagtttttcggggttgttcgtgtcgt

SEQ ID NO: 6264 - DNA, 22 bp, Artificial Sequence
  Description of Artificial Sequence: Synthetic oligonucleotide
tgacgtgtattttgtacgtggt

SEQ ID NO: 6265 - DNA, 22 bp, Artificial Sequence
  Description of Artificial Sequence: Synthetic oligonucleotide
agcgtagattatcgagttggtg

SEQ ID NO: 6266 - DNA, 19 bp, Artificial Sequence
  Description of Artificial Sequence: Synthetic oligonucleotide
ctacgacacgaacaacccc

SEQ ID NO: 6267 - DNA, 34 bp, Artificial Sequence
  Description of Artificial Sequence: Synthetic oligonucleotide
gacgtgtattttgtacgtggtggtgagtggtaat

SEQ ID NO: 6268 - DNA, 21 bp, Artificial Sequence
  Description of Artificial Sequence: Synthetic oligonucleotide
agcgttaagttacgtttttcg

SEQ ID NO: 6269 - DNA, 24 bp, Artificial Sequence
  Description of Artificial Sequence: Synthetic oligonucleotide
cgacaaaacgcactaaactaataa

SEQ ID NO: 6270 - DNA, 24 bp, Artificial Sequence
  Description of Artificial Sequence: Synthetic oligonucleotide
gtgatgacgtgtattttgtacgtg

SEQ ID NO: 6271 - DNA, 19 bp, Artificial Sequence
  Description of Artificial Sequence: Synthetic oligonucleotide
ctacgttcaccactcgacc

SEQ ID NO: 6272 - DNA, 21 bp, Artificial Sequence
  Description of Artificial Sequence: Synthetic oligonucleotide
aacgcgaaatacgacacataa

SEQ ID NO: 6273 - DNA, 19 bp, Artificial Sequence
  Description of Artificial Sequence: Synthetic oligonucleotide
tatcgaattaacgcggagg

SEQ ID NO: 6274 - DNA, 23 bp, Artificial Sequence
  Description of Artificial Sequence: Synthetic oligonucleotide
aatctacgctacgttcaccactc

SEQ ID NO: 6275 - DNA, 20 bp, Artificial Sequence
  Description of Artificial Sequence: Synthetic oligonucleotide
ttttaggaaggtagtcgcgt

SEQ ID NO: 6276 - DNA, 23 bp, Artificial Sequence
  Description of Artificial Sequence: Synthetic oligonucleotide
aaccataaacaacgtaaaaacga

SEQ ID NO: 6277 - DNA, 22 bp, Artificial Sequence
  Description of Artificial Sequence: Synthetic oligonucleotide
ctcaacgaacttaacaacgaat

SEQ ID NO: 6278 - DNA, 23 bp, Artificial Sequence
  Description of Artificial Sequence: Synthetic oligonucleotide
cgagattaaggaggttattacgg

SEQ ID NO: 6279 - DNA, 33 bp, Artificial Sequence
  Description of Artificial Sequence: Synthetic oligonucleotide
aatttgttcggttttattcgcgtcgtggttaat

SEQ ID NO: 6280 - DNA, 20 bp, Artificial Sequence
  Description of Artificial Sequence: Synthetic oligonucleotide
tttaggaaggtagtcgcgtt

SEQ ID NO: 6281 - DNA, 21 bp, Artificial Sequence
  Description of Artificial Sequence: Synthetic oligonucleotide
cgcgaaatacgacacataaat

SEQ ID NO: 6282 - DNA, 22 bp, Artificial Sequence
  Description of Artificial Sequence: Synthetic oligonucleotide
gtgttcggtttcgtgtattttt

SEQ ID NO: 6283 - DNA, 18 bp, Artificial Sequence
  Description of Artificial Sequence: Synthetic oligonucleotide
gaaaactcgcccttacgc

SEQ ID NO: 6284 - DNA, 19 bp, Artificial Sequence
  Description of Artificial Sequence: Synthetic oligonucleotide
acgcgaataaaaccgaaca

SEQ ID NO: 6285 - DNA, 18 bp, Artificial Sequence
  Description of Artificial Sequence: Synthetic oligonucleotide
tacgacacgaacaacccc

SEQ ID NO: 6286 - DNA, 22 bp, Artificial Sequence
  Description of Artificial Sequence: Synthetic oligonucleotide
cgacgagattaaggaggttatt

SEQ ID NO: 6287 - DNA, 19 bp, Artificial Sequence
  Description of Artificial Sequence: Synthetic oligonucleotide
aggaaggtagtcgcgtttt

SEQ ID NO: 6288 - DNA, 21 bp, Artificial Sequence
  Description of Artificial Sequence: Synthetic oligonucleotide
gttatcggcggtatttgtagc

SEQ ID NO: 6289 - DNA, 21 bp, Artificial Sequence
  Description of Artificial Sequence: Synthetic oligonucleotide
cctaatcctccgcgttaattc

SEQ ID NO: 6290 - DNA, 37 bp, Artificial Sequence
  Description of Artificial Sequence: Synthetic oligonucleotide
ttcggtttcgtgtattttttcgagggttttatcgaag

SEQ ID NO: 6291 - DNA, 21 bp, Artificial Sequence
  Description of Artificial Sequence: Synthetic oligonucleotide
tggtgaacgtagcgtagatta

SEQ ID NO: 6292 - DNA, 21 bp, Artificial Sequence
  Description of Artificial Sequence: Synthetic oligonucleotide
acgctcaacgaacttaacaac

SEQ ID NO: 6293 - DNA, 24 bp, Artificial Sequence
  Description of Artificial Sequence: Synthetic oligonucleotide
tatatcgtagtttgcgtgtttaag

SEQ ID NO: 6294 - DNA, 18 bp, Artificial Sequence
  Description of Artificial Sequence: Synthetic oligonucleotide
cgcgaataaaaccgaaca

SEQ ID NO: 6295 - DNA, 25 bp, Artificial Sequence
  Description of Artificial Sequence: Synthetic oligonucleotide
cgaacaaattatccgtaataacctc

SEQ ID NO: 6296 - DNA, 18 bp, Artificial Sequence
  Description of Artificial Sequence: Synthetic oligonucleotide
cacgacgcgaataaaacc

SEQ ID NO: 6297 - DNA, 18 bp, Artificial Sequence
  Description of Artificial Sequence: Synthetic oligonucleotide
ccacgacgcgaataaaac

SEQ ID NO: 6298 - DNA, 18 bp, Artificial Sequence
  Description of Artificial Sequence: Synthetic oligonucleotide
aagttcgttgagcgttcg

SEQ ID NO: 6299 - DNA, 20 bp, Artificial Sequence
  Description of Artificial Sequence: Synthetic oligonucleotide
ttttgtacggcggttatttg

SEQ ID NO: 6300 - DNA, 21 bp, Artificial Sequence
  Description of Artificial Sequence: Synthetic oligonucleotide
gcgtgtttgtacgaggagaat

SEQ ID NO: 6301 - DNA, 21 bp, Artificial Sequence
  Description of Artificial Sequence: Synthetic oligonucleotide
atctacgctacgttcaccact

SEQ ID NO: 6302 - DNA, 20 bp, Artificial Sequence
  Description of Artificial Sequence: Synthetic oligonucleotide
cgagtggtgaacgtagcgta

SEQ ID NO: 6303 - DNA, 19 bp, Artificial Sequence
  Description of Artificial Sequence: Synthetic oligonucleotide
atcgcgtgtttgtacgagg

SEQ ID NO: 6304 - DNA, 24 bp, Artificial Sequence
  Description of Artificial Sequence: Synthetic oligonucleotide
ataaaaccgaacaaattatccgta

SEQ ID NO: 6305 - DNA, 18 bp, Artificial Sequence
  Description of Artificial Sequence: Synthetic oligonucleotide
gaatgaagacggcgaggt

SEQ ID NO: 6306 - DNA, 22 bp, Artificial Sequence
  Description of Artificial Sequence: Synthetic oligonucleotide
accacgtacaaaatacacgtca

SEQ ID NO: 6307 - DNA, 22 bp, Artificial Sequence
  Description of Artificial Sequence: Synthetic oligonucleotide
attttacgttattttgtacggc

SEQ ID NO: 6308 - DNA, 22 bp, Artificial Sequence
  Description of Artificial Sequence: Synthetic oligonucleotide
tatttgtagcgtgttcggtttc

SEQ ID NO: 6309 - DNA, 18 bp, Artificial Sequence
  Description of Artificial Sequence: Synthetic oligonucleotide
acctcgccgtcttcattc

SEQ ID NO: 6310 - DNA, 22 bp, Artificial Sequence
  Description of Artificial Sequence: Synthetic oligonucleotide
ataaacaacgcgaaatacgaca

SEQ ID NO: 6311 - DNA, 22 bp, Artificial Sequence
  Description of Artificial Sequence: Synthetic oligonucleotide
cataaacaacgcgaaatacgac

SEQ ID NO: 6312 - DNA, 25 bp, Artificial Sequence
  Description of Artificial Sequence: Synthetic oligonucleotide
gtatatcgtagtttgcgtgtttaag

SEQ ID NO: 6313 - DNA, 20 bp, Artificial Sequence
  Description of Artificial Sequence: Synthetic oligonucleotide
ttgttaagttcgttgagcgt

SEQ ID NO: 6314 - DNA, 20 bp, Artificial Sequence
  Description of Artificial Sequence: Synthetic oligonucleotide
cgttgttaagttcgttgagc

SEQ ID NO: 6315 - DNA, 20 bp, Artificial Sequence
  Description of Artificial Sequence: Synthetic oligonucleotide
tgttaagttcgttgagcgtt

SEQ ID NO: 6316 - DNA, 24 bp, Artificial Sequence
  Description of Artificial Sequence: Synthetic oligonucleotide
tatagcgttaagttacgtttttcg

SEQ ID NO: 6317 - DNA, 20 bp, Artificial Sequence
  Description of Artificial Sequence: Synthetic oligonucleotide
ttatcgcgtgtttgtacgag

SEQ ID NO: 6318 - DNA, 19 bp, Artificial Sequence
  Description of Artificial Sequence: Synthetic oligonucleotide
agaatgaagacggcgaggt

SEQ ID NO: 6319 - DNA, 24 bp, Artificial Sequence
  Description of Artificial Sequence: Synthetic oligonucleotide
ccgaacaaattatccgtaataacc

SEQ ID NO: 6320 - DNA, 18 bp, Artificial Sequence
  Description of Artificial Sequence: Synthetic oligonucleotide
gacgggcgtttgaagttt

SEQ ID NO: 6321 - DNA, 20 bp, Artificial Sequence
  Description of Artificial Sequence: Synthetic oligonucleotide
tggtgaacgtagcgtagatt

SEQ ID NO: 6322 - DNA, 22 bp, Artificial Sequence
  Description of Artificial Sequence: Synthetic oligonucleotide
accataaacaacgtaaaaacga

SEQ ID NO: 6323 - DNA, 20 bp, Artificial Sequence
  Description of Artificial Sequence: Synthetic oligonucleotide
ttttatcgcgtgtttgtacg

SEQ ID NO: 6324 - DNA, 24 bp, Artificial Sequence
  Description of Artificial Sequence: Synthetic oligonucleotide
cgcgaaatacgacacataaataac

SEQ ID NO: 6325 - DNA, 22 bp, Artificial Sequence
  Description of Artificial Sequence: Synthetic oligonucleotide
taagttacgtttttcgggtttt

SEQ ID NO: 6326 - DNA, 18 bp, Artificial Sequence
  Description of Artificial Sequence: Synthetic oligonucleotide
ccaaataaccgccgtaca

SEQ ID NO: 6327 - DNA, 23 bp, Artificial Sequence
  Description of Artificial Sequence: Synthetic oligonucleotide
taagatttttatcgcgtgtttgt

SEQ ID NO: 6328 - DNA, 19 bp, Artificial Sequence
  Description of Artificial Sequence: Synthetic oligonucleotide
attaacgcggaggattagg

SEQ ID NO: 6329 - DNA, 18 bp, Artificial Sequence
  Description of Artificial Sequence: Synthetic oligonucleotide
cgccgtcttcattctcct

SEQ ID NO: 6330 - DNA, 18 bp, Artificial Sequence
  Description of Artificial Sequence: Synthetic oligonucleotide
cctcgccgtcttcattct

SEQ ID NO: 6331 - DNA, 18 bp, Artificial Sequence
  Description of Artificial Sequence: Synthetic oligonucleotide
cgaacaaccccgaaaaac

SEQ ID NO: 6332 - DNA, 31 bp, Artificial Sequence
  Description of Artificial Sequence: Synthetic oligonucleotide
agttggtgatgacgtgtattttgtacgtggt

SEQ ID NO: 6333 - DNA, 18 bp, Artificial Sequence
  Description of Artificial Sequence: Synthetic oligonucleotide
acgaacaaccccgaaaaa

SEQ ID NO: 6334 - DNA, 19 bp, Artificial Sequence
  Description of Artificial Sequence: Synthetic oligonucleotide
tcgagttggtgatgacgtg

SEQ ID NO: 6335 - DNA, 21 bp, Artificial Sequence
  Description of Artificial Sequence: Synthetic oligonucleotide
cgttattttgtacggcggtta

SEQ ID NO: 6336 - DNA, 19 bp, Artificial Sequence
  Description of Artificial Sequence: Synthetic oligonucleotide
acgctacgttcaccactcg

SEQ ID NO: 6337 - DNA, 22 bp, Artificial Sequence
  Description of Artificial Sequence: Synthetic oligonucleotide
ctacgcctactctaacgcaaac

SEQ ID NO: 6338 - DNA, 22 bp, Artificial Sequence
  Description of Artificial Sequence: Synthetic oligonucleotide
cgaagtcggatacgttgtagat

SEQ ID NO: 6339 - DNA, 30 bp, Artificial Sequence
  Description of Artificial Sequence: Synthetic oligonucleotide
gacgaagatggcgacgtcgaagaagatttg

SEQ ID NO: 6340 - DNA, 22 bp, Artificial Sequence
  Description of Artificial Sequence: Synthetic oligonucleotide
tacgcctactctaacgcaaact

SEQ ID NO: 6341 - DNA, 22 bp, Artificial Sequence
  Description of Artificial Sequence: Synthetic oligonucleotide
tcgtactaaacctaccctacgc

SEQ ID NO: 6342 - DNA, 22 bp, Artificial Sequence
  Description of Artificial Sequence: Synthetic oligonucleotide
tataggtacgcgatgaggattt

SEQ ID NO: 6343 - DNA, 47 bp, Artificial Sequence
  Description of Artificial Sequence: Synthetic oligonucleotide
tataacggcggcgaagatgatgagaaataattttaggtagtcgtcgt

SEQ ID NO: 6344 - DNA, 22 bp, Artificial Sequence
  Description of Artificial Sequence: Synthetic oligonucleotide
aatcctcatcgcgtacctatac

SEQ ID NO: 6345 - DNA, 22 bp, Artificial Sequence
  Description of Artificial Sequence: Synthetic oligonucleotide
gcgttacgtttattattcggtc

SEQ ID NO: 6346 - DNA, 37 bp, Artificial Sequence
  Description of Artificial Sequence: Synthetic oligonucleotide
ggcgttggttatggttacgtacgagtttcgtacgcgt

SEQ ID NO: 6347 - DNA, 22 bp, Artificial Sequence
  Description of Artificial Sequence: Synthetic oligonucleotide
acgaagtcggatacgttgtaga

SEQ ID NO: 6348 - DNA, 22 bp, Artificial Sequence
  Description of Artificial Sequence: Synthetic oligonucleotide
acgcctactctaacgcaaacta

SEQ ID NO: 6349 - DNA, 22 bp, Artificial Sequence
  Description of Artificial Sequence: Synthetic oligonucleotide
tacgaagtcggatacgttgtag

SEQ ID NO: 6350 - DNA, 22 bp, Artificial Sequence
  Description of Artificial Sequence: Synthetic oligonucleotide
tcgtcttcacgctactcataac

SEQ ID NO: 6351 - DNA, 22 bp, Artificial Sequence
  Description of Artificial Sequence: Synthetic oligonucleotide
agtaagaaatagaggtcggcgt

SEQ ID NO: 6352 - DNA, 33 bp, Artificial Sequence
  Description of Artificial Sequence: Synthetic oligonucleotide
gtcggtgaggtttatgagtagcgcgaagtgcgg

SEQ ID NO: 6353 - DNA, 22 bp, Artificial Sequence
  Description of Artificial Sequence: Synthetic oligonucleotide
gtcgtcttcacgctactcataa

SEQ ID NO: 6354 - DNA, 21 bp, Artificial Sequence
  Description of Artificial Sequence: Synthetic oligonucleotide
catcgcgtacctatacgaaaa

SEQ ID NO: 6355 - DNA, 22 bp, Artificial Sequence
  Description of Artificial Sequence: Synthetic oligonucleotide
cgttacgtttattattcggtcg

SEQ ID NO: 6356 - DNA, 22 bp, Artificial Sequence
  Description of Artificial Sequence: Synthetic oligonucleotide
tgcgttacgtttattattcggt

SEQ ID NO: 6357 - DNA, 22 bp, Artificial Sequence
  Description of Artificial Sequence: Synthetic oligonucleotide
cgtactaaacctaccctacgcc

SEQ ID NO: 6358 - DNA, 21 bp, Artificial Sequence
  Description of Artificial Sequence: Synthetic oligonucleotide
cgaagtcggatacgttgtaga

SEQ ID NO: 6359 - DNA, 23 bp, Artificial Sequence
  Description of Artificial Sequence: Synthetic oligonucleotide
gtacgaagtcggatacgttgtag

SEQ ID NO: 6360 - DNA, 22 bp, Artificial Sequence
  Description of Artificial Sequence: Synthetic oligonucleotide
cgtcttcacgctactcataacc

SEQ ID NO: 6361 - DNA, 22 bp, Artificial Sequence
  Description of Artificial Sequence: Synthetic oligonucleotide
ataggtacgcgatgaggatttt

SEQ ID NO: 6362 - DNA, 21 bp, Artificial Sequence
  Description of Artificial Sequence: Synthetic oligonucleotide
acgaacgcctaaaatcctaaa

SEQ ID NO: 6363 - DNA, 27 bp, Artificial Sequence
  Description of Artificial Sequence: Synthetic oligonucleotide
agcgtgaagacgacgagcgcgtagcgt

SEQ ID NO: 6364 - DNA, 22 bp, Artificial Sequence
  Description of Artificial Sequence: Synthetic oligonucleotide
tcgacgacatctacaacgtatc

SEQ ID NO: 6365 - DNA, 21 bp, Artificial Sequence
  Description of Artificial Sequence: Synthetic oligonucleotide
gttttagtttttcgcgttggt

SEQ ID NO: 6366 - DNA, 29 bp, Artificial Sequence
  Description of Artificial Sequence: Synthetic oligonucleotide
ttcgatgaggttttcgagggagtgtacga

SEQ ID NO: 6367 - DNA, 22 bp, Artificial Sequence
  Description of Artificial Sequence: Synthetic oligonucleotide
gtaagaaatagaggtcggcgtt

SEQ ID NO: 6368 - DNA, 22 bp, Artificial Sequence
  Description of Artificial Sequence: Synthetic oligonucleotide
acgccgacctctatttcttact

SEQ ID NO: 6369 - DNA, 22 bp, Artificial Sequence
  Description of Artificial Sequence: Synthetic oligonucleotide
cgtcgaagaagatttggtgtta

SEQ ID NO: 6370 - DNA, 29 bp, Artificial Sequence
  Description of Artificial Sequence: Synthetic oligonucleotide
tgcgttagagtaggcgtaggtgaaagagg

SEQ ID NO: 6371 - DNA, 22 bp, Artificial Sequence
  Description of Artificial Sequence: Synthetic oligonucleotide
ttgcgttacgtttattattcgg

SEQ ID NO: 6372 - DNA, 21 bp, Artificial Sequence
  Description of Artificial Sequence: Synthetic oligonucleotide
aaaatcctcatcgcgtaccta

SEQ ID NO: 6373 - DNA, 22 bp, Artificial Sequence
  Description of Artificial Sequence: Synthetic oligonucleotide
tattattcggtcgtttagcgtt

SEQ ID NO: 6374 - DNA, 23 bp, Artificial Sequence
  Description of Artificial Sequence: Synthetic oligonucleotide
aaatcctcatcgcgtacctatac

SEQ ID NO: 6375 - DNA, 21 bp, Artificial Sequence
  Description of Artificial Sequence: Synthetic oligonucleotide
taagaaatagaggtcggcgtt

SEQ ID NO: 6376 - DNA, 22 bp, Artificial Sequence
  Description of Artificial Sequence: Synthetic oligonucleotide
gtcggatacgttgtagatgtcg

SEQ ID NO: 6377 - DNA, 22 bp, Artificial Sequence
  Description of Artificial Sequence: Synthetic oligonucleotide
tcatcgcgtacctatacgaaaa

SEQ ID NO: 6378 - DNA, 21 bp, Artificial Sequence
  Description of Artificial Sequence: Synthetic oligonucleotide
atcacgaataacctacccgac

SEQ ID NO: 6379 - DNA, 22 bp, Artificial Sequence
  Description of Artificial Sequence: Synthetic oligonucleotide
tcgatagcggtaaagaatggta

SEQ ID NO: 6380 - DNA, 45 bp, Artificial Sequence
  Description of Artificial Sequence: Synthetic oligonucleotide
gataggataatagcgttttggttattagaaagatgttgattacgg

SEQ ID NO: 6381 - DNA, 22 bp, Artificial Sequence
  Description of Artificial Sequence: Synthetic oligonucleotide
tgtacgaagtcggatacgttgt

SEQ ID NO: 6382 - DNA, 22 bp, Artificial Sequence
  Description of Artificial Sequence: Synthetic oligonucleotide
gaagtcggatacgttgtagatg

SEQ ID NO: 6383 - DNA, 22 bp, Artificial Sequence
  Description of Artificial Sequence: Synthetic oligonucleotide
acgctaaacgaccgaataataa

SEQ ID NO: 6384 - DNA, 22 bp, Artificial Sequence
  Description of Artificial Sequence: Synthetic oligonucleotide
ggattaggatttttgcgatacg

SEQ ID NO: 6385 - DNA, 42 bp, Artificial Sequence
  Description of Artificial Sequence: Synthetic oligonucleotide
tacgtataggatgtacgttattattagttcgatgatttgcgt

SEQ ID NO: 6386 - DNA, 21 bp, Artificial Sequence
  Description of Artificial Sequence: Synthetic oligonucleotide
cgaacgcctaaaatcctaaaa

SEQ ID NO: 6387 - DNA, 21 bp, Artificial Sequence
  Description of Artificial Sequence: Synthetic oligonucleotide
tcggatacgttgtagatgtcg

SEQ ID NO: 6388 - DNA, 23 bp, Artificial Sequence
  Description of Artificial Sequence: Synthetic oligonucleotide
aagtcggatacgttgtagatgtc

SEQ ID NO: 6389 - DNA, 21 bp, Artificial Sequence
  Description of Artificial Sequence: Synthetic oligonucleotide
ttttagtttttcgcgttggtt

SEQ ID NO: 6390 - DNA, 22 bp, Artificial Sequence
  Description of Artificial Sequence: Synthetic oligonucleotide
gcgtattatttcgtcgttttta

SEQ ID NO: 6391 - DNA, 32 bp, Artificial Sequence
  Description of Artificial Sequence: Synthetic oligonucleotide
ttcgtataggtacgcgatgaggattttgtcgg

SEQ ID NO: 6392 - DNA, 22 bp, Artificial Sequence
  Description of Artificial Sequence: Synthetic oligonucleotide
gacgaacgcctaaaatcctaaa

SEQ ID NO: 6393 - DNA, 23 bp, Artificial Sequence
  Description of Artificial Sequence: Synthetic oligonucleotide
tacgaagtcggatacgttgtaga

SEQ ID NO: 6394 - DNA, 21 bp, Artificial Sequence
  Description of Artificial Sequence: Synthetic oligonucleotide
ctaaaccgacgaaaccaaaaa

SEQ ID NO: 6395 - DNA, 22 bp, Artificial Sequence
  Description of Artificial Sequence: Synthetic oligonucleotide
cgatagcggtaaagaatggtag

SEQ ID NO: 6396 - DNA, 22 bp, Artificial Sequence
  Description of Artificial Sequence: Synthetic oligonucleotide
tacggcgcggatggagtcgggt

SEQ ID NO: 6397 - DNA, 21 bp, Artificial Sequence
  Description of Artificial Sequence: Synthetic oligonucleotide
taggtacgcgatgaggatttt

SEQ ID NO: 6398 - DNA, 22 bp, Artificial Sequence
  Description of Artificial Sequence: Synthetic oligonucleotide
ttcacctacgcctactctaacg

SEQ ID NO: 6399 - DNA, 21 bp, Artificial Sequence
  Description of Artificial Sequence: Synthetic oligonucleotide
acgtcgaagaagatttggtgt

SEQ ID NO: 6400 - DNA, 20 bp, Artificial Sequence
  Description of Artificial Sequence: Synthetic oligonucleotide
tacctcacctaaaccgacga

SEQ ID NO: 6401 - DNA, 21 bp, Artificial Sequence
  Description of Artificial Sequence: Synthetic oligonucleotide
gtaagaaatagaggtcggcgt

SEQ ID NO: 6402 - DNA, 20 bp, Artificial Sequence
  Description of Artificial Sequence: Synthetic oligonucleotide
ttagtttttcgcgttggttc

SEQ ID NO: 6403 - DNA, 21 bp, Artificial Sequence
  Description of Artificial Sequence: Synthetic oligonucleotide
gtttatgagtagcgcgaagtg

SEQ ID NO: 6404 - DNA, 21 bp, Artificial Sequence
  Description of Artificial Sequence: Synthetic oligonucleotide
acgcctactctaacgcaaact

SEQ ID NO: 6405 - DNA, 21 bp, Artificial Sequence
  Description of Artificial Sequence: Synthetic oligonucleotide
cgcctactctaacgcaaacta

SEQ ID NO: 6406 - DNA, 23 bp, Artificial Sequence
  Description of Artificial Sequence: Synthetic oligonucleotide
tagtaagaaatagaggtcggcgt

SEQ ID NO: 6407 - DNA, 20 bp, Artificial Sequence
  Description of Artificial Sequence: Synthetic oligonucleotide
tttcgagggagtgtacgaag

SEQ ID NO: 6408 - DNA, 27 bp, Artificial Sequence
  Description of Artificial Sequence: Synthetic oligonucleotide
agatgtcgtcgatgacgaagatggcga

SEQ ID NO: 6409 - DNA, 21 bp, Artificial Sequence
  Description of Artificial Sequence: Synthetic oligonucleotide
cacctacgcctactctaacgc

SEQ ID NO: 6410 - DNA, 21 bp, Artificial Sequence
  Description of Artificial Sequence: Synthetic oligonucleotide
acgaataacctacccgactcc

SEQ ID NO: 6411 - DNA, 22 bp, Artificial Sequence
  Description of Artificial Sequence: Synthetic oligonucleotide
cgcctactctaacgcaaactac

SEQ ID NO: 6412 - DNA, 20 bp, Artificial Sequence
  Description of Artificial Sequence: Synthetic oligonucleotide
tcgagggagtgtacgaagtc

SEQ ID NO: 6413 - DNA, 22 bp, Artificial Sequence
  Description of Artificial Sequence: Synthetic oligonucleotide
agtcggatacgttgtagatgtc

SEQ ID NO: 6414 - DNA, 21 bp, Artificial Sequence
  Description of Artificial Sequence: Synthetic oligonucleotide
tttcgagggagtgtacgaagt

SEQ ID NO: 6415 - DNA, 21 bp, Artificial Sequence
  Description of Artificial Sequence: Synthetic oligonucleotide
tttagtttttcgcgttggttc

SEQ ID NO: 6416 - DNA, 22 bp, Artificial Sequence
  Description of Artificial Sequence: Synthetic oligonucleotide
aggtttatgagtagcgcgaagt

SEQ ID NO: 6417 - DNA, 23 bp, Artificial Sequence
  Description of Artificial Sequence: Synthetic oligonucleotide
atcgacgacatctacaacgtatc

SEQ ID NO: 6418 - DNA, 20 bp, Artificial Sequence
  Description of Artificial Sequence: Synthetic oligonucleotide
cgaataacctacccgactcc

SEQ ID NO: 6419 - DNA, 21 bp, Artificial Sequence
  Description of Artificial Sequence: Synthetic oligonucleotide
gtacgaagtcggatacgttgt

SEQ ID NO: 6420 - DNA, 21 bp, Artificial Sequence
  Description of Artificial Sequence: Synthetic oligonucleotide
gattaggatttttgcgatacg

SEQ ID NO: 6421 - DNA, 20 bp, Artificial Sequence
  Description of Artificial Sequence: Synthetic oligonucleotide
cgcgtattatttcgtcgttt

SEQ ID NO: 6422 - DNA, 22 bp, Artificial Sequence
  Description of Artificial Sequence: Synthetic oligonucleotide
taagaaatagaggtcggcgttc

SEQ ID NO: 6423 - DNA, 21 bp, Artificial Sequence
  Description of Artificial Sequence: Synthetic oligonucleotide
ggtttatgagtagcgcgaagt

SEQ ID NO: 6424 - DNA, 21 bp, Artificial Sequence
  Description of Artificial Sequence: Synthetic oligonucleotide
cgccgacctctatttcttact

SEQ ID NO: 6425 - DNA, 22 bp, Artificial Sequence
  Description of Artificial Sequence: Synthetic oligonucleotide
gatgatttgcgttacgtttatt

SEQ ID NO: 6426 - DNA, 21 bp, Artificial Sequence
  Description of Artificial Sequence: Synthetic oligonucleotide
gacgaacgcctaaaatcctaa

SEQ ID NO: 6427 - DNA, 21 bp, Artificial Sequence
  Description of Artificial Sequence: Synthetic oligonucleotide
ttcgagggagtgtacgaagtc

SEQ ID NO: 6428 - DNA, 20 bp, Artificial Sequence
  Description of Artificial Sequence: Synthetic oligonucleotide
ttttcgagggagtgtacgaa

SEQ ID NO: 6429 - DNA, 21 bp, Artificial Sequence
  Description of Artificial Sequence: Synthetic oligonucleotide
ccatcctacacgacgactacc

SEQ ID NO: 6430 - DNA, 32 bp, Artificial Sequence
  Description of Artificial Sequence: Synthetic oligonucleotide
ggtgtagtagtatataacggcggcgaagatga

SEQ ID NO: 6431 - DNA, 20 bp, Artificial Sequence
  Description of Artificial Sequence: Synthetic oligonucleotide
ctcacctaaaccgacgaaac

SEQ ID NO: 6432 - DNA, 20 bp, Artificial Sequence
  Description of Artificial Sequence: Synthetic oligonucleotide
aaatcctcatcgcgtaccta

SEQ ID NO: 6433 - DNA, 20 bp, Artificial Sequence
  Description of Artificial Sequence: Synthetic oligonucleotide
aaaatcctcatcgcgtacct

SEQ ID NO: 6434 - DNA, 22 bp, Artificial Sequence
  Description of Artificial Sequence: Synthetic oligonucleotide
ttattattcggtcgtttagcgt

SEQ ID NO: 6435 - DNA, 21 bp, Artificial Sequence
  Description of Artificial Sequence: Synthetic oligonucleotide
aacgccgacctctatttctta

SEQ ID NO: 6436 - DNA, 20 bp, Artificial Sequence
  Description of Artificial Sequence: Synthetic oligonucleotide
ctcgtcgtcttcacgctact

SEQ ID NO: 6437 - DNA, 20 bp, Artificial Sequence
  Description of Artificial Sequence: Synthetic oligonucleotide
gacaaaatcctcatcgcgta

SEQ ID NO: 6438 - DNA, 22 bp, Artificial Sequence
  Description of Artificial Sequence: Synthetic oligonucleotide
atcctaaaaactaacgctacgc

SEQ ID NO: 6439 - DNA, 40 bp, Artificial Sequence
  Description of Artificial Sequence: Synthetic oligonucleotide
tgcggtatataaatggttatgagtagcgtgaagacgacga

SEQ ID NO: 6440 - DNA, 20 bp, Artificial Sequence
  Description of Artificial Sequence: Synthetic oligonucleotide
catcacgaataacctacccg

SEQ ID NO: 6441 - DNA, 20 bp, Artificial Sequence
  Description of Artificial Sequence: Synthetic oligonucleotide
gttttcgagggagtgtacga

SEQ ID NO: 6442 - DNA, 21 bp, Artificial Sequence
  Description of Artificial Sequence: Synthetic oligonucleotide
gccatcctacacgacgactac

SEQ ID NO: 6443 - DNA, 21 bp, Artificial Sequence
  Description of Artificial Sequence: Synthetic oligonucleotide
taggtttcgatgaggttttcg

SEQ ID NO: 6444 - DNA, 20 bp, Artificial Sequence
  Description of Artificial Sequence: Synthetic oligonucleotide
aagaaatagaggtcggcgtt

SEQ ID NO: 6445 - DNA, 21 bp, Artificial Sequence
  Description of Artificial Sequence: Synthetic oligonucleotide
catcacgaataacctacccga

SEQ ID NO: 6446 - DNA, 21 bp, Artificial Sequence
  Description of Artificial Sequence: Synthetic oligonucleotide
cctacgcctactctaacgcaa

SEQ ID NO: 6447 - DNA, 21 bp, Artificial Sequence
  Description of Artificial Sequence: Synthetic oligonucleotide
attattcggtcgtttagcgtt

SEQ ID NO: 6448 - DNA, 22 bp, Artificial Sequence
  Description of Artificial Sequence: Synthetic oligonucleotide
cgacatctacaacgtatccgac

SEQ ID NO: 6449 - DNA, 22 bp, Artificial Sequence
  Description of Artificial Sequence: Synthetic oligonucleotide
cgacgacatctacaacgtatcc

SEQ ID NO: 6450 - DNA, 21 bp, Artificial Sequence
  Description of Artificial Sequence: Synthetic oligonucleotide
tgcgttacgtttattattcgg

SEQ ID NO: 6451 - DNA, 20 bp, Artificial Sequence
  Description of Artificial Sequence: Synthetic oligonucleotide
gtttcgatgaggttttcgag

SEQ ID NO: 6452 - DNA, 20 bp, Artificial Sequence
  Description of Artificial Sequence: Synthetic oligonucleotide
taaactaaacgcacatcgca

SEQ ID NO: 6453 - DNA, 22 bp, Artificial Sequence
  Description of Artificial Sequence: Synthetic oligonucleotide
agtcgggtaggttattcgtgat

SEQ ID NO: 6454 - DNA, 29 bp, Artificial Sequence
  Description of Artificial Sequence: Synthetic oligonucleotide
gagcgcgaagaggtttttgagtacgtagg

SEQ ID NO: 6455 - DNA, 21 bp, Artificial Sequence
  Description of Artificial Sequence: Synthetic oligonucleotide
cacttcgcgctactcataaac

SEQ ID NO: 6456 - DNA, 24 bp, Artificial Sequence
  Description of Artificial Sequence: Synthetic oligonucleotide
ggtcggcgttcgtgaggttgtcgg

SEQ ID NO: 6457 - DNA, 23 bp, Artificial Sequence
  Description of Artificial Sequence: Synthetic oligonucleotide
aatcctaaaaactaacgctacgc

SEQ ID NO: 6458 - DNA, 20 bp, Artificial Sequence
  Description of Artificial Sequence: Synthetic oligonucleotide
atcacgaataacctacccga

SEQ ID NO: 6459 - DNA, 22 bp, Artificial Sequence
  Description of Artificial Sequence: Synthetic oligonucleotide
ttacgtttattattcggtcgtt

SEQ ID NO: 6460 - DNA, 22 bp, Artificial Sequence
  Description of Artificial Sequence: Synthetic oligonucleotide
tacgtttattattcggtcgttt

SEQ ID NO: 6461 - DNA, 22 bp, Artificial Sequence
  Description of Artificial Sequence: Synthetic oligonucleotide
gaacgccgacctctatttctta

SEQ ID NO: 6462 - DNA, 21 bp, Artificial Sequence
  Description of Artificial Sequence: Synthetic oligonucleotide
ctacctcacctaaaccgacga

SEQ ID NO: 6463 - DNA, 21 bp, Artificial Sequence
  Description of Artificial Sequence: Synthetic oligonucleotide
ctacgcctactctaacgcaaa

SEQ ID NO: 6464 - DNA, 19 bp, Artificial Sequence
  Description of Artificial Sequence: Synthetic oligonucleotide
cacctaaaccgacgaaacc

SEQ ID NO: 6465 - DNA, 19 bp, Artificial Sequence
  Description of Artificial Sequence: Synthetic oligonucleotide
acctaaaccgacgaaacca

SEQ ID NO: 6466 - DNA, 21 bp, Artificial Sequence
  Description of Artificial Sequence: Synthetic oligonucleotide
gtcgggtaggttattcgtgat

SEQ ID NO: 6467 - DNA, 20 bp, Artificial Sequence
  Description of Artificial Sequence: Synthetic oligonucleotide
aggtacgcgatgaggatttt

SEQ ID NO: 6468 - DNA, 23 bp, Artificial Sequence
  Description of Artificial Sequence: Synthetic oligonucleotide
gttacgtttattattcggtcgtt

SEQ ID NO: 6469 - DNA, 20 bp, Artificial Sequence
  Description of Artificial Sequence: Synthetic oligonucleotide
tacgcgatgaggattttgtc

SEQ ID NO: 6470 - DNA, 19 bp, Artificial Sequence
  Description of Artificial Sequence: Synthetic oligonucleotide
acctcacctaaaccgacga

SEQ ID NO: 6471 - DNA, 24 bp, Artificial Sequence
  Description of Artificial Sequence: Synthetic oligonucleotide
tgatttgcgttacgtttattattc

SEQ ID NO: 6472 - DNA, 20 bp, Artificial Sequence
  Description of Artificial Sequence: Synthetic oligonucleotide
agaaatagaggtcggcgttc

SEQ ID NO: 6473 - DNA, 20 bp, Artificial Sequence
  Description of Artificial Sequence: Synthetic oligonucleotide
tcacgaataacctacccgac

SEQ ID NO: 6474 - DNA, 20 bp, Artificial Sequence
  Description of Artificial Sequence: Synthetic oligonucleotide
cgtcgaagaagatttggtgt

SEQ ID NO: 6475 - DNA, 22 bp, Artificial Sequence
  Description of Artificial Sequence: Synthetic oligonucleotide
accgaataataaacgtaacgca

SEQ ID NO: 6476 - DNA, 21 bp, Artificial Sequence
  Description of Artificial Sequence: Synthetic oligonucleotide
tagtagtacggtcgtggcgat

SEQ ID NO: 6477 - DNA, 34 bp, Artificial Sequence
  Description of Artificial Sequence: Synthetic oligonucleotide
tacgggtagtttcgggaagttgttgtatatgagg

SEQ ID NO: 6478 - DNA, 21 bp, Artificial Sequence
  Description of Artificial Sequence: Synthetic oligonucleotide
atcctcatcgcgtacctatac

SEQ ID NO: 6479 - DNA, 20 bp, Artificial Sequence
  Description of Artificial Sequence: Synthetic oligonucleotide
gggagtgtacgaagtcggat

SEQ ID NO: 6480 - DNA, 21 bp, Artificial Sequence
  Description of Artificial Sequence: Synthetic oligonucleotide
tcacctacgcctactctaacg

SEQ ID NO: 6481 - DNA, 23 bp, Artificial Sequence
  Description of Artificial Sequence: Synthetic oligonucleotide
tcctacacgacgactacctaaaa

SEQ ID NO: 6482 - DNA, 20 bp, Artificial Sequence
  Description of Artificial Sequence: Synthetic oligonucleotide
gtacgcgatgaggattttgt

SEQ ID NO: 6483 - DNA, 32 bp, Artificial Sequence
  Description of Artificial Sequence: Synthetic oligonucleotide
agtagtatataacggcggcgaagatgatgaga

SEQ ID NO: 6484 - DNA, 22 bp, Artificial Sequence
  Description of Artificial Sequence: Synthetic oligonucleotide
catcctacacgacgactaccta

SEQ ID NO: 6485 - DNA, 21 bp, Artificial Sequence
  Description of Artificial Sequence: Synthetic oligonucleotide
ttttcccgacctactacaacg

SEQ ID NO: 6486 - DNA, 22 bp, Artificial Sequence
  Description of Artificial Sequence: Synthetic oligonucleotide
cgccgtaatcaacatctttcta

SEQ ID NO: 6487 - DNA, 21 bp, Artificial Sequence
  Description of Artificial Sequence: Synthetic oligonucleotide
gtcgttgtagtaggtcgggaa

SEQ ID NO: 6488 - DNA, 48 bp, Artificial Sequence
  Description of Artificial Sequence: Synthetic oligonucleotide
tagtatttcgatagcggtaaagaatggtagaggataggataatagcgt

SEQ ID NO: 6489 - DNA, 20 bp, Artificial Sequence
  Description of Artificial Sequence: Synthetic oligonucleotide
tcgcgctactcataaacctc

SEQ ID NO: 6490 - DNA, 21 bp, Artificial Sequence
  Description of Artificial Sequence: Synthetic oligonucleotide
cgttgtagtaggtcgggaaaa

SEQ ID NO: 6491 - DNA, 23 bp, Artificial Sequence
  Description of Artificial Sequence: Synthetic oligonucleotide
tacgcctactctaacgcaaacta

SEQ ID NO: 6492 - DNA, 20 bp, Artificial Sequence
  Description of Artificial Sequence: Synthetic oligonucleotide
tttcccgacctactacaacg

SEQ ID NO: 6493 - DNA, 23 bp, Artificial Sequence
  Description of Artificial Sequence: Synthetic oligonucleotide
cgttacgtttattattcggtcgt

SEQ ID NO: 6494 - DNA, 22 bp, Artificial Sequence
  Description of Artificial Sequence: Synthetic oligonucleotide
gacatctacaacgtatccgact

SEQ ID NO: 6495 - DNA, 33 bp, Artificial Sequence
  Description of Artificial Sequence: Synthetic oligonucleotide
ggtaggtttcgatgaggttttcgagggagtgta

SEQ ID NO: 6496 - DNA, 20 bp, Artificial Sequence
  Description of Artificial Sequence: Synthetic oligonucleotide
tcgttgtagtaggtcgggaa

SEQ ID NO: 6497 - DNA, 20 bp, Artificial Sequence
  Description of Artificial Sequence: Synthetic oligonucleotide
tattcggtcgtttagcgttg

SEQ ID NO: 6498 - DNA, 22 bp, Artificial Sequence
  Description of Artificial Sequence: Synthetic oligonucleotide
cgaataataaacgtaacgcaaa

SEQ ID NO: 6499 - DNA, 21 bp, Artificial Sequence
  Description of Artificial Sequence: Synthetic oligonucleotide
aagaaatagaggtcggcgttc

SEQ ID NO: 6500 - DNA, 21 bp, Artificial Sequence
  Description of Artificial Sequence: Synthetic oligonucleotide
gaggtttatgagtagcgcgaa

SEQ ID NO: 6501 - DNA, 19 bp, Artificial Sequence
  Description of Artificial Sequence: Synthetic oligonucleotide
agggagtgtacgaagtcgg

SEQ ID NO: 6502 - DNA, 22 bp, Artificial Sequence
  Description of Artificial Sequence: Synthetic oligonucleotide
ctcatcgcgtacctatacgaaa

SEQ ID NO: 6503 - DNA, 21 bp, Artificial Sequence
  Description of Artificial Sequence: Synthetic oligonucleotide
gagtcgggtaggttattcgtg

SEQ ID NO: 6504 - DNA, 21 bp, Artificial Sequence
  Description of Artificial Sequence: Synthetic oligonucleotide
tcatcacgaataacctacccg

SEQ ID NO: 6505 - DNA, 19 bp, Artificial Sequence
  Description of Artificial Sequence: Synthetic oligonucleotide
cctaaaccgacgaaaccaa

SEQ ID NO: 6506 - DNA, 20 bp, Artificial Sequence
  Description of Artificial Sequence: Synthetic oligonucleotide
cggatacgttgtagatgtcg

SEQ ID NO: 6507 - DNA, 22 bp, Artificial Sequence
  Description of Artificial Sequence: Synthetic oligonucleotide
accgctatcgaaatactaaaaa

SEQ ID NO: 6508 - DNA, 22 bp, Artificial Sequence
  Description of Artificial Sequence: Synthetic oligonucleotide
gttatgagtagcgtgaagacga

SEQ ID NO: 6509 - DNA, 30 bp, Artificial Sequence
  Description of Artificial Sequence: Synthetic oligonucleotide
aggattttaggcgttcgtcgtcgttgtagt

SEQ ID NO: 6510 - DNA, 22 bp, Artificial Sequence
  Description of Artificial Sequence: Synthetic oligonucleotide
ttatgagtagcgtgaagacgac

SEQ ID NO: 6511 - DNA, 22 bp, Artificial Sequence
  Description of Artificial Sequence: Synthetic oligonucleotide
aataaacgtaacgcaaatcatc

SEQ ID NO: 6512 - DNA, 22 bp, Artificial Sequence
  Description of Artificial Sequence: Synthetic oligonucleotide
tagtagtacggtcgtggcgata

SEQ ID NO: 6513 - DNA, 21 bp, Artificial Sequence
  Description of Artificial Sequence: Synthetic oligonucleotide
acctacgcctactctaacgca

SEQ ID NO: 6514 - DNA, 21 bp, Artificial Sequence
  Description of Artificial Sequence: Synthetic oligonucleotide
tcatcgcgtacctatacgaaa

SEQ ID NO: 6515 - DNA, 22 bp, Artificial Sequence
  Description of Artificial Sequence: Synthetic oligonucleotide
gagttattgtcgttttcgtcgt

SEQ ID NO: 6516 - DNA, 22 bp, Artificial Sequence
  Description of Artificial Sequence: Synthetic oligonucleotide
ctcctaaatacaacgcgacttc

SEQ ID NO: 6517 - DNA, 36 bp, Artificial Sequence
  Description of Artificial Sequence: Synthetic oligonucleotide
tacgtgtgttgttcgttagagttatgatagagaggt

SEQ ID NO: 6518 - DNA, 22 bp, Artificial Sequence
  Description of Artificial Sequence: Synthetic oligonucleotide
tgaatatgcgttagagtagcga

SEQ ID NO: 6519 - DNA, 22 bp, Artificial Sequence
  Description of Artificial Sequence: Synthetic oligonucleotide
acgacgaaaacgacaataactc

SEQ ID NO: 6520 - DNA, 25 bp, Artificial Sequence
  Description of Artificial Sequence: Synthetic oligonucleotide
ttacgatgtcggggaagagcggtgg

SEQ ID NO: 6521 - DNA, 22 bp, Artificial Sequence
  Description of Artificial Sequence: Synthetic oligonucleotide
aggagttattgtcgttttcgtc

SEQ ID NO: 6522 - DNA, 22 bp, Artificial Sequence
  Description of Artificial Sequence: Synthetic oligonucleotide
gaggagttattgtcgttttcgt

SEQ ID NO: 6523 - DNA, 22 bp, Artificial Sequence
  Description of Artificial Sequence: Synthetic oligonucleotide
acgaggagttattgtcgttttc

SEQ ID NO: 6524 - DNA, 22 bp, Artificial Sequence
  Description of Artificial Sequence: Synthetic oligonucleotide
gacgaggagttattgtcgtttt

SEQ ID NO: 6525 - DNA, 22 bp, Artificial Sequence
  Description of Artificial Sequence: Synthetic oligonucleotide
gacgaaaacgacaataactcct

SEQ ID NO: 6526 - DNA, 22 bp, Artificial Sequence
  Description of Artificial Sequence: Synthetic oligonucleotide
actcctaaatacaacgcgactt

SEQ ID NO: 6527 - DNA, 22 bp, Artificial Sequence
  Description of Artificial Sequence: Synthetic oligonucleotide
aactcctaaatacaacgcgact

SEQ ID NO: 6528 - DNA, 22 bp, Artificial Sequence
  Description of Artificial Sequence: Synthetic oligonucleotide
gtagttgcggtttgttatcgtt

SEQ ID NO: 6529 - DNA, 22 bp, Artificial Sequence
  Description of Artificial Sequence: Synthetic oligonucleotide
aaaacgactctttcgtctctcc

SEQ ID NO: 6530 - DNA, 35 bp, Artificial Sequence
  Description of Artificial Sequence: Synthetic oligonucleotide
tgtcgtgttattgaaagtagagagacgcgaaaaat

SEQ ID NO: 6531 - DNA, 21 bp, Artificial Sequence
  Description of Artificial Sequence: Synthetic oligonucleotide
aacgcgacttcctaccactat

SEQ ID NO: 6532 - DNA, 21 bp, Artificial Sequence
  Description of Artificial Sequence: Synthetic oligonucleotide
attttcggaagtttgtcgttt

SEQ ID NO: 6533 - DNA, 22 bp, Artificial Sequence
  Description of Artificial Sequence: Synthetic oligonucleotide
ttcgcgtctctctactttcaat

SEQ ID NO: 6534 - DNA, 31 bp, Artificial Sequence
  Description of Artificial Sequence: Synthetic oligonucleotide
agtgtagttgcggtttgttatcgttggttgt

SEQ ID NO: 6535 - DNA, 22 bp, Artificial Sequence
  Description of Artificial Sequence: Synthetic oligonucleotide
gttagagtagcgagtcgggtat

SEQ ID NO: 6536 - DNA, 21 bp, Artificial Sequence
  Description of Artificial Sequence: Synthetic oligonucleotide
aatacaacgcgacttcctacc

SEQ ID NO: 6537 - DNA, 21 bp, Artificial Sequence
  Description of Artificial Sequence: Synthetic oligonucleotide
aaacgactctttcgtctctcc

SEQ ID NO: 6538 - DNA, 21 bp, Artificial Sequence
  Description of Artificial Sequence: Synthetic oligonucleotide
acgcgacttcctaccactatc

SEQ ID NO: 6539 - DNA, 22 bp, Artificial Sequence
  Description of Artificial Sequence: Synthetic oligonucleotide
tgcgtgaatatgcgttagagta

SEQ ID NO: 6540 - DNA, 21 bp, Artificial Sequence
  Description of Artificial Sequence: Synthetic oligonucleotide
acaataactcctcgtcgtcct

SEQ ID NO: 6541 - DNA, 21 bp, Artificial Sequence
  Description of Artificial Sequence: Synthetic oligonucleotide
cgacgaaaacgacaataactc

SEQ ID NO: 6542 - DNA, 22 bp, Artificial Sequence
  Description of Artificial Sequence: Synthetic oligonucleotide
acgaaaacgacaataactcctc

SEQ ID NO: 6543 - DNA, 21 bp, Artificial Sequence
  Description of Artificial Sequence: Synthetic oligonucleotide
gacaataactcctcgtcgtcc

SEQ ID NO: 6544 - DNA, 22 bp, Artificial Sequence
  Description of Artificial Sequence: Synthetic oligonucleotide
ctaaatacaacgcgacttccta

SEQ ID NO: 6545 - DNA, 22 bp, Artificial Sequence
  Description of Artificial Sequence: Synthetic oligonucleotide
aaatacaacgcgacttcctacc

SEQ ID NO: 6546 - DNA, 22 bp, Artificial Sequence
  Description of Artificial Sequence: Synthetic oligonucleotide
cctaaatacaacgcgacttcct

SEQ ID NO: 6547 - DNA, 22 bp, Artificial Sequence
  Description of Artificial Sequence: Synthetic oligonucleotide
taaatacaacgcgacttcctac

SEQ ID NO: 6548 - DNA, 22 bp, Artificial Sequence
  Description of Artificial Sequence: Synthetic oligonucleotide
gacaataactcctcgtcgtcct

SEQ ID NO: 6549 - DNA, 23 bp, Artificial Sequence
  Description of Artificial Sequence: Synthetic oligonucleotide
gtgaatatgcgttagagtagcga

SEQ ID NO: 6550 - DNA, 22 bp, Artificial Sequence
  Description of Artificial Sequence: Synthetic oligonucleotide
tcgcgtctctctactttcaata

SEQ ID NO: 6551 - DNA, 21 bp, Artificial Sequence
  Description of Artificial Sequence: Synthetic oligonucleotide
tcctaaatacaacgcgacttc

SEQ ID NO: 6552 - DNA, 21 bp, Artificial Sequence
  Description of Artificial Sequence: Synthetic oligonucleotide
tttcgcgtctctctactttca

SEQ ID NO: 6553 - DNA, 23 bp, Artificial Sequence
  Description of Artificial Sequence: Synthetic oligonucleotide
aatttttcgcgtctctctacttt

SEQ ID NO: 6554 - DNA, 22 bp, Artificial Sequence
  Description of Artificial Sequence: Synthetic oligonucleotide
ccccgacatcgtaaaactaaac

SEQ ID NO: 6555 - DNA, 31 bp, Artificial Sequence
  Description of Artificial Sequence: Synthetic oligonucleotide
atcgtgtagcgtcgggttacgtatatttggt

SEQ ID NO: 6556 - DNA, 21 bp, Artificial Sequence
  Description of Artificial Sequence: Synthetic oligonucleotide
acgactctttcgtctctccaa

SEQ ID NO: 6557 - DNA, 35 bp, Artificial Sequence
  Description of Artificial Sequence: Synthetic oligonucleotide
gttgtcgtgttattgaaagtagagagacgcgaaaa

SEQ ID NO: 6558 - DNA, 21 bp, Artificial Sequence
  Description of Artificial Sequence: Synthetic oligonucleotide
aacgactctttcgtctctcca

SEQ ID NO: 6559 - DNA, 35 bp, Artificial Sequence
  Description of Artificial Sequence: Synthetic oligonucleotide
ttgtcgtgttattgaaagtagagagacgcgaaaaa

SEQ ID NO: 6560 - DNA, 22 bp, Artificial Sequence
  Description of Artificial Sequence: Synthetic oligonucleotide
gcgtgaatatgcgttagagtag

SEQ ID NO: 6561 - DNA, 22 bp, Artificial Sequence
  Description of Artificial Sequence: Synthetic oligonucleotide
cgtgaatatgcgttagagtagc

SEQ ID NO: 6562 - DNA, 23 bp, Artificial Sequence
  Description of Artificial Sequence: Synthetic oligonucleotide
taaaacgactctttcgtctctcc

SEQ ID NO: 6563 - DNA, 21 bp, Artificial Sequence
  Description of Artificial Sequence: Synthetic oligonucleotide
cctaaatacaacgcgacttcc

SEQ ID NO: 6564 - DNA, 21 bp, Artificial Sequence
  Description of Artificial Sequence: Synthetic oligonucleotide
cgacgaggagttattgtcgtt

SEQ ID NO: 6565 - DNA, 20 bp, Artificial Sequence
  Description of Artificial Sequence: Synthetic oligonucleotide
cgacaataactcctcgtcgt

SEQ ID NO: 6566 - DNA, 20 bp, Artificial Sequence
  Description of Artificial Sequence: Synthetic oligonucleotide
tttcggaagtttgtcgtttc

SEQ ID NO: 6567 - DNA, 22 bp, Artificial Sequence
  Description of Artificial Sequence: Synthetic oligonucleotide
tatcgttggttgtcgtgttatt

SEQ ID NO: 6568 - DNA, 23 bp, Artificial Sequence
  Description of Artificial Sequence: Synthetic oligonucleotide
aacaaaatctaactacgctcgaa

SEQ ID NO: 6569 - DNA, 33 bp, Artificial Sequence
  Description of Artificial Sequence: Synthetic oligonucleotide
gacgcgaaaaatttggagagacgaaagagtcgt

SEQ ID NO: 6570 - DNA, 22 bp, Artificial Sequence
  Description of Artificial Sequence: Synthetic oligonucleotide
ttatcgttggttgtcgtgttat

SEQ ID NO: 6571 - DNA, 23 bp, Artificial Sequence
  Description of Artificial Sequence: Synthetic oligonucleotide
ccgacatcgtaaaactaaacgta

SEQ ID NO: 6572 - DNA, 22 bp, Artificial Sequence
  Description of Artificial Sequence: Synthetic oligonucleotide
ttttcgcgtctctctactttca

SEQ ID NO: 6573 - DNA, 23 bp, Artificial Sequence
  Description of Artificial Sequence: Synthetic oligonucleotide
cgtttttagtagtgtagttgcgg

SEQ ID NO: 6574 - DNA, 39 bp, Artificial Sequence
  Description of Artificial Sequence: Synthetic oligonucleotide
atcgttggttgtcgtgttattgaaagtagagagacgcga

SEQ ID NO: 6575 - DNA, 23 bp, Artificial Sequence
  Description of Artificial Sequence: Synthetic oligonucleotide
atttttcgcgtctctctactttc

SEQ ID NO: 6576 - DNA, 21 bp, Artificial Sequence
  Description of Artificial Sequence: Synthetic oligonucleotide
ttttcggaagtttgtcgtttc

SEQ ID NO: 6577 - DNA, 21 bp, Artificial Sequence
  Description of Artificial Sequence: Synthetic oligonucleotide
aggacgacgaggagttattgt

SEQ ID NO: 6578 - DNA, 21 bp, Artificial Sequence
  Description of Artificial Sequence: Synthetic oligonucleotide
cgaggagttattgtcgttttc

SEQ ID NO: 6579 - DNA, 22 bp, Artificial Sequence
  Description of Artificial Sequence: Synthetic oligonucleotide
acgtttagttttacgatgtcgg

SEQ ID NO: 6580 - DNA, 22 bp, Artificial Sequence
  Description of Artificial Sequence: Synthetic oligonucleotide
taactctaacgaacaacacacg

SEQ ID NO: 6581 - DNA, 26 bp, Artificial Sequence
  Description of Artificial Sequence: Synthetic oligonucleotide
agcggtggtttcgcggaggacgacga

SEQ ID NO: 6582 - DNA, 23 bp, Artificial Sequence
  Description of Artificial Sequence: Synthetic oligonucleotide
ctaaaacgactctttcgtctctc

SEQ ID NO: 6583 - DNA, 23 bp, Artificial Sequence
  Description of Artificial Sequence: Synthetic oligonucleotide
gttatcgttggttgtcgtgttat

SEQ ID NO: 6584 - DNA, 22 bp, Artificial Sequence
  Description of Artificial Sequence: Synthetic oligonucleotide
tgtagttgcggtttgttatcgt

SEQ ID NO: 6585 - DNA, 22 bp, Artificial Sequence
  Description of Artificial Sequence: Synthetic oligonucleotide
gtgtagttgcggtttgttatcg

SEQ ID NO: 6586 - DNA, 21 bp, Artificial Sequence
  Description of Artificial Sequence: Synthetic oligonucleotide
tagttgcggtttgttatcgtt

SEQ ID NO: 6587 - DNA, 21 bp, Artificial Sequence
  Description of Artificial Sequence: Synthetic oligonucleotide
agttattgtcgttttcgtcgt

SEQ ID NO: 6588 - DNA, 22 bp, Artificial Sequence
  Description of Artificial Sequence: Synthetic oligonucleotide
cgcgtctctctactttcaataa

SEQ ID NO: 6589 - DNA, 20 bp, Artificial Sequence
  Description of Artificial Sequence: Synthetic oligonucleotide
tccccgacatcgtaaaacta

SEQ ID NO: 6590 - DNA, 23 bp, Artificial Sequence
  Description of Artificial Sequence: Synthetic oligonucleotide
gcgtttttagtagtgtagttgcg

SEQ ID NO: 6591 - DNA, 21 bp, Artificial Sequence
  Description of Artificial Sequence: Synthetic oligonucleotide
gtttgttatcgttggttgtcg

SEQ ID NO: 6592 - DNA, 22 bp, Artificial Sequence
  Description of Artificial Sequence: Synthetic oligonucleotide
acgctcgaactaaaacgactct

SEQ ID NO: 6593 - DNA, 34 bp, Artificial Sequence
  Description of Artificial Sequence: Synthetic oligonucleotide
ttgaaagtagagagacgcgaaaaatttggagaga

SEQ ID NO: 6594 - DNA, 22 bp, Artificial Sequence
  Description of Artificial Sequence: Synthetic oligonucleotide
gttatcgttggttgtcgtgtta

SEQ ID NO: 6595 - DNA, 22 bp, Artificial Sequence
  Description of Artificial Sequence: Synthetic oligonucleotide
aaacaaaatctaactacgctcg

SEQ ID NO: 6596 - DNA, 21 bp, Artificial Sequence
  Description of Artificial Sequence: Synthetic oligonucleotide
ggagttattgtcgttttcgtc

SEQ ID NO: 6597 - DNA, 22 bp, Artificial Sequence
  Description of Artificial Sequence: Synthetic oligonucleotide
gtttgttatcgttggttgtcgt

SEQ ID NO: 6598 - DNA, 21 bp, Artificial Sequence
  Description of Artificial Sequence: Synthetic oligonucleotide
cgctcgaactaaaacgactct

SEQ ID NO: 6599 - DNA, 24 bp, Artificial Sequence
  Description of Artificial Sequence: Synthetic oligonucleotide
actaaaacgactctttcgtctctc

SEQ ID NO: 6600 - DNA, 23 bp, Artificial Sequence
  Description of Artificial Sequence: Synthetic oligonucleotide
caaaatctaactacgctcgaact

SEQ ID NO: 6601 - DNA, 22 bp, Artificial Sequence
  Description of Artificial Sequence: Synthetic oligonucleotide
acaaaatctaactacgctcgaa

SEQ ID NO: 6602 - DNA, 20 bp, Artificial Sequence
  Description of Artificial Sequence: Synthetic oligonucleotide
cgcgacttcctaccactatc

SEQ ID NO: 6603 - DNA, 21 bp, Artificial Sequence
  Description of Artificial Sequence: Synthetic oligonucleotide
tttgttatcgttggttgtcgt

SEQ ID NO: 6604 - DNA, 22 bp, Artificial Sequence
  Description of Artificial Sequence: Synthetic oligonucleotide
aacgcgacttcctaccactatc

SEQ ID NO: 6605 - DNA, 21 bp, Artificial Sequence
  Description of Artificial Sequence: Synthetic oligonucleotide
gaggacgacgaggagttattg

SEQ ID NO: 6606 - DNA, 21 bp, Artificial Sequence
  Description of Artificial Sequence: Synthetic oligonucleotide
caataactcctcgtcgtcctc

SEQ ID NO: 6607 - DNA, 21 bp, Artificial Sequence
  Description of Artificial Sequence: Synthetic oligonucleotide
atacaacgcgacttcctacca

SEQ ID NO: 6608 - DNA, 22 bp, Artificial Sequence
  Description of Artificial Sequence: Synthetic oligonucleotide
atattatcgtgtagcgtcgggt

SEQ ID NO: 6609 - DNA, 20 bp, Artificial Sequence
  Description of Artificial Sequence: Synthetic oligonucleotide
aagtttgtcgtttcgggagt

SEQ ID NO: 6610 - DNA, 22 bp, Artificial Sequence
  Description of Artificial Sequence: Synthetic oligonucleotide
gaggacgacgaggagttattgt

SEQ ID NO: 6611 - DNA, 22 bp, Artificial Sequence
  Description of Artificial Sequence: Synthetic oligonucleotide
ttgcgtgaatatgcgttagagt

SEQ ID NO: 6612 - DNA, 22 bp, Artificial Sequence
  Description of Artificial Sequence: Synthetic oligonucleotide
gttgcgtgaatatgcgttagag

SEQ ID NO: 6613 - DNA, 21 bp, Artificial Sequence
  Description of Artificial Sequence: Synthetic oligonucleotide
ttccccgacatcgtaaaacta

SEQ ID NO: 6614 - DNA, 21 bp, Artificial Sequence
  Description of Artificial Sequence: Synthetic oligonucleotide
gaaaacgacaataactcctcg

SEQ ID NO: 6615 - DNA, 22 bp, Artificial Sequence
  Description of Artificial Sequence: Synthetic oligonucleotide
taatttacgtgtgttgttcgtt

SEQ ID NO: 6616 - DNA, 30 bp, Artificial Sequence
  Description of Artificial Sequence: Synthetic oligonucleotide
ttatgatagagaggtggtcgggtcgggata

SEQ ID NO: 6617 - DNA, 22 bp, Artificial Sequence
  Description of Artificial Sequence: Synthetic oligonucleotide
cgactctttcgtctctccaaat

SEQ ID NO: 6618 - DNA, 23 bp, Artificial Sequence
  Description of Artificial Sequence: Synthetic oligonucleotide
caactcctaaatacaacgcgact

SEQ ID NO: 6619 - DNA, 24 bp, Artificial Sequence
  Description of Artificial Sequence: Synthetic oligonucleotide
cataactctaacgaacaacacacg

SEQ ID NO: 6620 - DNA, 23 bp, Artificial Sequence
  Description of Artificial Sequence: Synthetic oligonucleotide
ataactctaacgaacaacacacg

SEQ ID NO: 6621 - DNA, 23 bp, Artificial Sequence
  Description of Artificial Sequence: Synthetic oligonucleotide
aactaaaacgactctttcgtctc

SEQ ID NO: 6622 - DNA, 36 bp, Artificial Sequence
  Description of Artificial Sequence: Synthetic oligonucleotide
gtgttattgaaagtagagagacgcgaaaaatttgga

SEQ ID NO: 6623 - DNA, 21 bp, Artificial Sequence
  Description of Artificial Sequence: Synthetic oligonucleotide
aataactcctcgtcgtcctcc

SEQ ID NO: 6624 - DNA, 21 bp, Artificial Sequence
  Description of Artificial Sequence: Synthetic oligonucleotide
cccgacatcgtaaaactaaac

SEQ ID NO: 6625 - DNA, 23 bp, Artificial Sequence
  Description of Artificial Sequence: Synthetic oligonucleotide
gaatatgcgttagagtagcgagt

SEQ ID NO: 6626 - DNA, 46 bp, Artificial Sequence
  Description of Artificial Sequence: Synthetic oligonucleotide
gtcgtgttattgaaagtagagagacgcgaaaaatttggagagacga

SEQ ID NO: 6627 - DNA, 23 bp, Artificial Sequence
  Description of Artificial Sequence: Synthetic oligonucleotide
cgacatcgtaaaactaaacgtaa

SEQ ID NO: 6628 - DNA, 19 bp, Artificial Sequence
  Description of Artificial Sequence: Synthetic oligonucleotide
tccccgacatcgtaaaact

SEQ ID NO: 6629 - DNA, 24 bp, Artificial Sequence
  Description of Artificial Sequence: Synthetic oligonucleotide
ttaaacaaaatctaactacgctcg

SEQ ID NO: 6630 - DNA, 21 bp, Artificial Sequence
  Description of Artificial Sequence: Synthetic oligonucleotide
tgcgtgaatatgcgttagagt

SEQ ID NO: 6631 - DNA, 25 bp, Artificial Sequence
  Description of Artificial Sequence: Synthetic oligonucleotide
cttaaacaaaatctaactacgctcg

SEQ ID NO: 6632 - DNA, 19 bp, Artificial Sequence
  Description of Artificial Sequence: Synthetic oligonucleotide
agtagcgagtcgggtatcg

SEQ ID NO: 6633 - DNA, 22 bp, Artificial Sequence
  Description of Artificial Sequence: Synthetic oligonucleotide
atcgttggttgtcgtgttattg

SEQ ID NO: 6634 - DNA, 22 bp, Artificial Sequence
  Description of Artificial Sequence: Synthetic oligonucleotide
cgcgttgtttaagtagagtcgt

SEQ ID NO: 6635 - DNA, 20 bp, Artificial Sequence
  Description of Artificial Sequence: Synthetic oligonucleotide
aaatacaaatcgaatccccg

SEQ ID NO: 6636 - DNA, 27 bp, Artificial Sequence
  Description of Artificial Sequence: Synthetic oligonucleotide
ggcggcggagtttcgtttatcgggcga

SEQ ID NO: 6637 - DNA, 35 bp, Artificial Sequence
  Description of Artificial Sequence: Synthetic oligonucleotide
ggttgtcgtgttattgaaagtagagagacgcgaaa

SEQ ID NO: 6638 - DNA, 23 bp, Artificial Sequence
  Description of Artificial Sequence: Synthetic oligonucleotide
gacgaggagttattgtcgttttc

SEQ ID NO: 6639 - DNA, 21 bp, Artificial Sequence
  Description of Artificial Sequence: Synthetic oligonucleotide
ttagagtagcgagtcgggtat

SEQ ID NO: 6640 - DNA, 24 bp, Artificial Sequence
  Description of Artificial Sequence: Synthetic oligonucleotide
cgacatcgtaaaactaaacgtaaa

SEQ ID NO: 6641 - DNA, 20 bp, Artificial Sequence
  Description of Artificial Sequence: Synthetic oligonucleotide
acaataactcctcgtcgtcc

SEQ ID NO: 6642 - DNA, 22 bp, Artificial Sequence
  Description of Artificial Sequence: Synthetic oligonucleotide
gaatatgcgttagagtagcgag

SEQ ID NO: 6643 - DNA, 23 bp, Artificial Sequence
  Description of Artificial Sequence: Synthetic oligonucleotide
tgaatatgcgttagagtagcgag

SEQ ID NO: 6644 - DNA, 19 bp, Artificial Sequence
  Description of Artificial Sequence: Synthetic oligonucleotide
gcggtttgttatcgttggt

SEQ ID NO: 6645 - DNA, 22 bp, Artificial Sequence
  Description of Artificial Sequence: Synthetic oligonucleotide
ctacgctcgaactaaaacgact

SEQ ID NO: 6646 - DNA, 23 bp, Artificial Sequence
  Description of Artificial Sequence: Synthetic oligonucleotide
taaacaaaatctaactacgctcg

SEQ ID NO: 6647 - DNA, 21 bp, Artificial Sequence
  Description of Artificial Sequence: Synthetic oligonucleotide
tgttatcgttggttgtcgtgt

SEQ ID NO: 6648 - DNA, 33 bp, Artificial Sequence
  Description of Artificial Sequence: Synthetic oligonucleotide
agcgagtcgggtatcgatattatcgtgtagcgt

SEQ ID NO: 6649 - DNA, 21 bp, Artificial Sequence
  Description of Artificial Sequence: Synthetic oligonucleotide
tccccgacatcgtaaaactaa

SEQ ID NO: 6650 - DNA, 22 bp, Artificial Sequence
  Description of Artificial Sequence: Synthetic oligonucleotide
tttacgtgtgttgttcgttaga

SEQ ID NO: 6651 - DNA, 19 bp, Artificial Sequence
  Description of Artificial Sequence: Synthetic oligonucleotide
ttccccgacatcgtaaaac

SEQ ID NO: 6652 - DNA, 21 bp, Artificial Sequence
  Description of Artificial Sequence: Synthetic oligonucleotide
acgaaaacgacaataactcct

SEQ ID NO: 6653 - DNA, 20 bp, Artificial Sequence
  Description of Artificial Sequence: Synthetic oligonucleotide
cttccccgacatcgtaaaac

SEQ ID NO: 6654 - DNA, 33 bp, Artificial Sequence
  Description of Artificial Sequence: Synthetic oligonucleotide
agcgtcgggttacgtatatttggttttttacgt

SEQ ID NO: 6655 - DNA, 23 bp, Artificial Sequence
  Description of Artificial Sequence: Synthetic oligonucleotide
tacgtttagttttacgatgtcgg

SEQ ID NO: 6656 - DNA, 20 bp, Artificial Sequence
  Description of Artificial Sequence: Synthetic oligonucleotide
tacaacgcgacttcctacca

SEQ ID NO: 6657 - DNA, 21 bp, Artificial Sequence
  Description of Artificial Sequence: Synthetic oligonucleotide
gttgcgtgaatatgcgttaga

SEQ ID NO: 6658 - DNA, 24 bp, Artificial Sequence
  Description of Artificial Sequence: Synthetic oligonucleotide
aatttacgtgtgttgttcgttaga

SEQ ID NO: 6659 - DNA, 21 bp, Artificial Sequence
  Description of Artificial Sequence: Synthetic oligonucleotide
ggaggacgacgaggagttatt

SEQ ID NO: 6660 - DNA, 23 bp, Artificial Sequence
  Description of Artificial Sequence: Synthetic oligonucleotide
tacgctcgaactaaaacgactct

SEQ ID NO: 6661 - DNA, 21 bp, Artificial Sequence
  Description of Artificial Sequence: Synthetic oligonucleotide
tattatcgtgtagcgtcgggt

SEQ ID NO: 6662 - DNA, 21 bp, Artificial Sequence
  Description of Artificial Sequence: Synthetic oligonucleotide
cgaaaacgacaataactcctc

SEQ ID NO: 6663 - DNA, 21 bp, Artificial Sequence
  Description of Artificial Sequence: Synthetic oligonucleotide
gtagttgcggtttgttatcgt

SEQ ID NO: 6664 - DNA, 20 bp, Artificial Sequence
  Description of Artificial Sequence: Synthetic oligonucleotide
agttgcggtttgttatcgtt

SEQ ID NO: 6665 - DNA, 21 bp, Artificial Sequence
  Description of Artificial Sequence: Synthetic oligonucleotide
gaagaggattcgttcgagatt

SEQ ID NO: 6666 - DNA, 21 bp, Artificial Sequence
  Description of Artificial Sequence: Synthetic oligonucleotide
gaaacgacaaacttccgaaaa

SEQ ID NO: 6667 - DNA, 38 bp, Artificial Sequence
  Description of Artificial Sequence: Synthetic oligonucleotide
tttcgttttagttcgtatttaaggattttggaaggagg

SEQ ID NO: 6668 - DNA, 21 bp, Artificial Sequence
  Description of Artificial Sequence: Synthetic oligonucleotide
aactctaacgaacaacacacg

SEQ ID NO: 6669 - DNA, 21 bp, Artificial Sequence
  Description of Artificial Sequence: Synthetic oligonucleotide
ttgcgtgaatatgcgttagag

SEQ ID NO: 6670 - DNA, 21 bp, Artificial Sequence
  Description of Artificial Sequence: Synthetic oligonucleotide
gacgaaaacgacaataactcc

SEQ ID NO: 6671 - DNA, 19 bp, Artificial Sequence
  Description of Artificial Sequence: Synthetic oligonucleotide
ttacgatgtcggggaagag

SEQ ID NO: 6672 - DNA, 22 bp, Artificial Sequence
  Description of Artificial Sequence: Synthetic oligonucleotide
taaattacccaacgaaaacgac

SEQ ID NO: 6673 - DNA, 37 bp, Artificial Sequence
  Description of Artificial Sequence: Synthetic oligonucleotide
ttcgcggaggacgacgaggagttattgtcgttttcgt

SEQ ID NO: 6674 - DNA, 23 bp, Artificial Sequence
  Description of Artificial Sequence: Synthetic oligonucleotide
tgcgtgaatatgcgttagagtag

SEQ ID NO: 6675 - DNA, 19 bp, Artificial Sequence
  Description of Artificial Sequence: Synthetic oligonucleotide
ctcttccccgacatcgtaa

SEQ ID NO: 6676 - DNA, 21 bp, Artificial Sequence
  Description of Artificial Sequence: Synthetic oligonucleotide
ctcctaaatacaacgcgactt

SEQ ID NO: 6677 - DNA, 21 bp, Artificial Sequence
  Description of Artificial Sequence: Synthetic oligonucleotide
cgtttagttttacgatgtcgg

SEQ ID NO: 6678 - DNA, 20 bp, Artificial Sequence
  Description of Artificial Sequence: Synthetic oligonucleotide
cgtcgttttcgttgggtaat

SEQ ID NO: 6679 - DNA, 22 bp, Artificial Sequence
  Description of Artificial Sequence: Synthetic oligonucleotide
aatatgcgttagagtagcgagt

SEQ ID NO: 6680 - DNA, 19 bp, Artificial Sequence
  Description of Artificial Sequence: Synthetic oligonucleotide
gaagtttgtcgtttcggga

SEQ ID NO: 6681 - DNA, 21 bp, Artificial Sequence
  Description of Artificial Sequence: Synthetic oligonucleotide
tgttgcgtgaatatgcgttag

SEQ ID NO: 6682 - DNA, 23 bp, Artificial Sequence
  Description of Artificial Sequence: Synthetic oligonucleotide
atttacgtgtgttgttcgttaga

SEQ ID NO: 6683 - DNA, 25 bp, Artificial Sequence
  Description of Artificial Sequence: Synthetic oligonucleotide
gaactaaaacgactctttcgtctct

SEQ ID NO: 6684 - DNA, 36 bp, Artificial Sequence
  Description of Artificial Sequence: Synthetic oligonucleotide
tgttattgaaagtagagagacgcgaaaaatttggag

SEQ ID NO: 6685 - DNA, 21 bp, Artificial Sequence
  Description of Artificial Sequence: Synthetic oligonucleotide
tttttcgcgtctctctacttt

SEQ ID NO: 6686 - DNA, 20 bp, Artificial Sequence
  Description of Artificial Sequence: Synthetic oligonucleotide
cgttggttgtcgtgttattg

SEQ ID NO: 6687 - DNA, 19 bp, Artificial Sequence
  Description of Artificial Sequence: Synthetic oligonucleotide
agtttgtcgtttcgggagt

SEQ ID NO: 6688 - DNA, 22 bp, Artificial Sequence
  Description of Artificial Sequence: Synthetic oligonucleotide
gtttagttttacgatgtcgggg

SEQ ID NO: 6689 - DNA, 21 bp, Artificial Sequence
  Description of Artificial Sequence: Synthetic oligonucleotide
tcgttggttgtcgtgttattg

SEQ ID NO: 6690 - DNA, 21 bp, Artificial Sequence
  Description of Artificial Sequence: Synthetic oligonucleotide
ttgttatcgttggttgtcgtg

SEQ ID NO: 6691 - DNA, 20 bp, Artificial Sequence
  Description of Artificial Sequence: Synthetic oligonucleotide
gttgcggtttgttatcgttg

SEQ ID NO: 6692 - DNA, 20 bp, Artificial Sequence
  Description of Artificial Sequence: Synthetic oligonucleotide
aaacgacaaacttccgaaaa

SEQ ID NO: 6693 - DNA, 22 bp, Artificial Sequence
  Description of Artificial Sequence: Synthetic oligonucleotide
attttcggaagtttgtcgtttc

SEQ ID NO: 6694 - DNA, 24 bp, Artificial Sequence
  Description of Artificial Sequence: Synthetic oligonucleotide
cgtctctctactttcaataacacg

SEQ ID NO: 6695 - DNA, 20 bp, Artificial Sequence
  Description of Artificial Sequence: Synthetic oligonucleotide
gagtagcgagtcgggtatcg

SEQ ID NO: 6696 - DNA, 19 bp, Artificial Sequence
  Description of Artificial Sequence: Synthetic oligonucleotide
tttacgatgtcggggaaga

SEQ ID NO: 6697 - DNA, 19 bp, Artificial Sequence
  Description of Artificial Sequence: Synthetic oligonucleotide
ttgcggtttgttatcgttg

SEQ ID NO: 6698 - DNA, 19 bp, Artificial Sequence
  Description of Artificial Sequence: Synthetic oligonucleotide
tcttccccgacatcgtaaa

SEQ ID NO: 6699 - DNA, 21 bp, Artificial Sequence
  Description of Artificial Sequence: Synthetic oligonucleotide
gaatatgcgttagagtagcga

SEQ ID NO: 6700 - DNA, 19 bp, Artificial Sequence
  Description of Artificial Sequence: Synthetic oligonucleotide
aatacaaatcgaatccccg

SEQ ID NO: 6701 - DNA, 21 bp, Artificial Sequence
  Description of Artificial Sequence: Synthetic oligonucleotide
tttagttttacgatgtcgggg

SEQ ID NO: 6702 - DNA, 20 bp, Artificial Sequence
  Description of Artificial Sequence: Synthetic oligonucleotide
caataactcctcgtcgtcct

SEQ ID NO: 6703 - DNA, 21 bp, Artificial Sequence
  Description of Artificial Sequence: Synthetic oligonucleotide
cggtttgttatcgttggttgt

SEQ ID NO: 6704 - DNA, 20 bp, Artificial Sequence
  Description of Artificial Sequence: Synthetic oligonucleotide
tatcgtgtagcgtcgggtta

SEQ ID NO: 6705 - DNA, 19 bp, Artificial Sequence
  Description of Artificial Sequence: Synthetic oligonucleotide
gaaatgcgtggtcgttttc

SEQ ID NO: 6706 - DNA, 19 bp, Artificial Sequence
  Description of Artificial Sequence: Synthetic oligonucleotide
gtttgtcgtttcgggagtg

SEQ ID NO: 6707 - DNA, 20 bp, Artificial Sequence
  Description of Artificial Sequence: Synthetic oligonucleotide
tagttttacgatgtcgggga

SEQ ID NO: 6708 - DNA, 18 bp, Artificial Sequence
  Description of Artificial Sequence: Synthetic oligonucleotide
tttgtcgtttcgggagtg

SEQ ID NO: 6709 - DNA, 23 bp, Artificial Sequence
  Description of Artificial Sequence: Synthetic oligonucleotide
aactctaacgaacaacacacgta

SEQ ID NO: 6710 - DNA, 20 bp, Artificial Sequence
  Description of Artificial Sequence: Synthetic oligonucleotide
tttgttatcgttggttgtcg

SEQ ID NO: 6711 - DNA, 18 bp, Artificial Sequence
  Description of Artificial Sequence: Synthetic oligonucleotide
cggaagtttgtcgtttcg

SEQ ID NO: 6712 - DNA, 20 bp, Artificial Sequence
  Description of Artificial Sequence: Synthetic oligonucleotide
tgttgcgtgaatatgcgtta

SEQ ID NO: 6713 - DNA, 20 bp, Artificial Sequence
  Description of Artificial Sequence: Synthetic oligonucleotide
ggacgacgaggagttattgt

SEQ ID NO: 6714 - DNA, 19 bp, Artificial Sequence
  Description of Artificial Sequence: Synthetic oligonucleotide
acaacgcgacttcctacca

SEQ ID NO: 6715 - DNA, 25 bp, Artificial Sequence
  Description of Artificial Sequence: Synthetic oligonucleotide
aaaatctaactacgctcgaactaaa

SEQ ID NO: 6716 - DNA, 18 bp, Artificial Sequence
  Description of Artificial Sequence: Synthetic oligonucleotide
caacgcgacttcctacca

SEQ ID NO: 6717 - DNA, 20 bp, Artificial Sequence
  Description of Artificial Sequence: Synthetic oligonucleotide
attatcgtgtagcgtcgggt

SEQ ID NO: 6718 - DNA, 20 bp, Artificial Sequence
  Description of Artificial Sequence: Synthetic oligonucleotide
ttagttttacgatgtcgggg

SEQ ID NO: 6719 - DNA, 21 bp, Artificial Sequence
  Description of Artificial Sequence: Synthetic oligonucleotide
aaattacccaacgaaaacgac

SEQ ID NO: 6720 - DNA, 19 bp, Artificial Sequence
  Description of Artificial Sequence: Synthetic oligonucleotide
ttatcgtgtagcgtcgggt

SEQ ID NO: 6721 - DNA, 19 bp, Artificial Sequence
  Description of Artificial Sequence: Synthetic oligonucleotide
tatcgtgtagcgtcgggtt

SEQ ID NO: 6722 - DNA, 18 bp, Artificial Sequence
  Description of Artificial Sequence: Synthetic oligonucleotide
cgtttcgggagtggaaat

SEQ ID NO: 6723 - DNA, 22 bp, Artificial Sequence
  Description of Artificial Sequence: Synthetic oligonucleotide
aacgataacaaaccgcaactac

SEQ ID NO: 6724 - DNA, 30 bp, Artificial Sequence
  Description of Artificial Sequence: Synthetic oligonucleotide
ttcggttttttcgtttgcggaattgggcgt

SEQ ID NO: 6725 - DNA, 20 bp, Artificial Sequence
  Description of Artificial Sequence: Synthetic oligonucleotide
gttgttgcgtgaatatgcgt

SEQ ID NO: 6726 - DNA, 25 bp, Artificial Sequence
  Description of Artificial Sequence: Synthetic oligonucleotide
aaatctaactacgctcgaactaaaa

SEQ ID NO: 6727 - DNA, 21 bp, Artificial Sequence
  Description of Artificial Sequence: Synthetic oligonucleotide
ttagttttacgatgtcgggga

SEQ ID NO: 6728 - DNA, 22 bp, Artificial Sequence
  Description of Artificial Sequence: Synthetic oligonucleotide
taacacgacaaccaacgataac

SEQ ID NO: 6729 - DNA, 32 bp, Artificial Sequence
  Description of Artificial Sequence: Synthetic oligonucleotide
ggaattgggcgtttttagtagtgtagttgcgg

SEQ ID NO: 6730 - DNA, 24 bp, Artificial Sequence
  Description of Artificial Sequence: Synthetic oligonucleotide
aaatctaactacgctcgaactaaa

SEQ ID NO: 6731 - DNA, 19 bp, Artificial Sequence
  Description of Artificial Sequence: Synthetic oligonucleotide
caacgcgacttcctaccac

SEQ ID NO: 6732 - DNA, 19 bp, Artificial Sequence
  Description of Artificial Sequence: Synthetic oligonucleotide
ttgttgcgtgaatatgcgt

SEQ ID NO: 6733 - DNA, 43 bp, Artificial Sequence
  Description of Artificial Sequence: Synthetic oligonucleotide
gacgcgaaaaatttggagagacgaaagagtcgttttagttcga

SEQ ID NO: 6734 - DNA, 19 bp, Artificial Sequence
  Description of Artificial Sequence: Synthetic oligonucleotide
ttcggaagtttgtcgtttc

SEQ ID NO: 6735 - DNA, 22 bp, Artificial Sequence
  Description of Artificial Sequence: Synthetic oligonucleotide
attgaaagtagagagacgcgaa

SEQ ID NO: 6736 - DNA, 26 bp, Artificial Sequence
  Description of Artificial Sequence: Synthetic oligonucleotide
acttaaacaaaatctaactacgctcg

SEQ ID NO: 6737 - DNA, 34 bp, Artificial Sequence
  Description of Artificial Sequence: Synthetic oligonucleotide
aatttggagagacgaaagagtcgttttagttcga

SEQ ID NO: 6738 - DNA, 22 bp, Artificial Sequence
  Description of Artificial Sequence: Synthetic oligonucleotide
actctaacgaacaacacacgta

SEQ ID NO: 6739 - DNA, 20 bp, Artificial Sequence
  Description of Artificial Sequence: Synthetic oligonucleotide
cggtttgttatcgttggttg

SEQ ID NO: 6740 - DNA, 21 bp, Artificial Sequence
  Description of Artificial Sequence: Synthetic oligonucleotide
tacgctcgaactaaaacgact

SEQ ID NO: 6741 - DNA, 22 bp, Artificial Sequence
  Description of Artificial Sequence: Synthetic oligonucleotide
aaaaccgcctactctaataccg

SEQ ID NO: 6742 - DNA, 22 bp, Artificial Sequence
  Description of Artificial Sequence: Synthetic oligonucleotide
gtggagttagtagtttcgcgtg

SEQ ID NO: 6743 - DNA, 29 bp, Artificial Sequence
  Description of Artificial Sequence: Synthetic oligonucleotide
ggtaagcgaggtttcgtcgtcgtttacgt

SEQ ID NO: 6744 - DNA, 21 bp, Artificial Sequence
  Description of Artificial Sequence: Synthetic oligonucleotide
tggagttagtagtttcgcgtg

SEQ ID NO: 6745 - DNA, 21 bp, Artificial Sequence
  Description of Artificial Sequence: Synthetic oligonucleotide
aaaccgcctactctaataccg

SEQ ID NO: 6746 - DNA, 22 bp, Artificial Sequence
  Description of Artificial Sequence: Synthetic oligonucleotide
ggtggagttagtagtttcgcgt

SEQ ID NO: 6747 - DNA, 21 bp, Artificial Sequence
  Description of Artificial Sequence: Synthetic oligonucleotide
ggagttagtagtttcgcgtgg

SEQ ID NO: 6748 - DNA, 22 bp, Artificial Sequence
  Description of Artificial Sequence: Synthetic oligonucleotide
tatcgccccgaaaataaaaata

SEQ ID NO: 6749 - DNA, 22 bp, Artificial Sequence
  Description of Artificial Sequence: Synthetic oligonucleotide
taacgatggtaggtcgtagttg

SEQ ID NO: 6750 - DNA, 33 bp, Artificial Sequence
  Description of Artificial Sequence: Synthetic oligonucleotide
tagtttcgtaggcgggagggtcggaggcggtta

SEQ ID NO: 6751 - DNA, 22 bp, Artificial Sequence
  Description of Artificial Sequence: Synthetic oligonucleotide
cgaaccaactcctacgactact

SEQ ID NO: 6752 - DNA, 21 bp, Artificial Sequence
  Description of Artificial Sequence: Synthetic oligonucleotide
ggttaggtgtacgtgattcgg

SEQ ID NO: 6753 - DNA, 32 bp, Artificial Sequence
  Description of Artificial Sequence: Synthetic oligonucleotide
ggtgttcgattcgttgttttggcgtatgttta

SEQ ID NO: 6754 - DNA, 21 bp, Artificial Sequence
  Description of Artificial Sequence: Synthetic oligonucleotide
gggttaggtgtacgtgattcg

SEQ ID NO: 6755 - DNA, 23 bp, Artificial Sequence
  Description of Artificial Sequence: Synthetic oligonucleotide
taaaaccgcctactctaataccg

SEQ ID NO: 6756 - DNA, 21 bp, Artificial Sequence
  Description of Artificial Sequence: Synthetic oligonucleotide
gagttagtagtttcgcgtggc

SEQ ID NO: 6757 - DNA, 21 bp, Artificial Sequence
  Description of Artificial Sequence: Synthetic oligonucleotide
gttaggtgtacgtgattcggc

SEQ ID NO: 6758 - DNA, 23 bp, Artificial Sequence
  Description of Artificial Sequence: Synthetic oligonucleotide
ttaacgatggtaggtcgtagttg

SEQ ID NO: 6759 - DNA, 21 bp, Artificial Sequence
  Description of Artificial Sequence: Synthetic oligonucleotide
tatcgccccgaaaataaaaat

SEQ ID NO: 6760 - DNA, 22 bp, Artificial Sequence
  Description of Artificial Sequence: Synthetic oligonucleotide
aacgatggtaggtcgtagttgt

SEQ ID NO: 6761 - DNA, 20 bp, Artificial Sequence
  Description of Artificial Sequence: Synthetic oligonucleotide
ttaggtgtacgtgattcggc

SEQ ID NO: 6762 - DNA, 20 bp, Artificial Sequence
  Description of Artificial Sequence: Synthetic oligonucleotide
ctatcgccccgaaaataaaa

SEQ ID NO: 6763 - DNA, 26 bp, Artificial Sequence
  Description of Artificial Sequence: Synthetic oligonucleotide
ggcgggagggtcggaggcggttacgt

SEQ ID NO: 6764 - DNA, 21 bp, Artificial Sequence
  Description of Artificial Sequence: Synthetic oligonucleotide
cgaatcacgtacacctaaccc

SEQ ID NO: 6765 - DNA, 21 bp, Artificial Sequence
  Description of Artificial Sequence: Synthetic oligonucleotide
ggtagtggtttttcgtcgttt

SEQ ID NO: 6766 - DNA, 34 bp, Artificial Sequence
  Description of Artificial Sequence: Synthetic oligonucleotide
atcgttttttttcgatatcgtggagttgaacgtg

SEQ ID NO: 6767 - DNA, 21 bp, Artificial Sequence
  Description of Artificial Sequence: Synthetic oligonucleotide
ccgaatcacgtacacctaacc

SEQ ID NO: 6768 - DNA, 33 bp, Artificial Sequence
  Description of Artificial Sequence: Synthetic oligonucleotide
gttttttttcgatatcgtggagttgaacgtggg

SEQ ID NO: 6769 - DNA, 20 bp, Artificial Sequence
  Description of Artificial Sequence: Synthetic oligonucleotide
agttagtagtttcgcgtggc

SEQ ID NO: 6770 - DNA, 21 bp, Artificial Sequence
  Description of Artificial Sequence: Synthetic oligonucleotide
gccgaatcacgtacacctaac

SEQ ID NO: 6771 - DNA, 30 bp, Artificial Sequence
  Description of Artificial Sequence: Synthetic oligonucleotide
tttttcgatatcgtggagttgaacgtgggg

SEQ ID NO: 6772 - DNA, 21 bp, Artificial Sequence
  Description of Artificial Sequence: Synthetic oligonucleotide
atcgccccgaaaataaaaata

SEQ ID NO: 6773 - DNA, 20 bp, Artificial Sequence
  Description of Artificial Sequence: Synthetic oligonucleotide
atcgccccgaaaataaaaat

SEQ ID NO: 6774 - DNA, 21 bp, Artificial Sequence
  Description of Artificial Sequence: Synthetic oligonucleotide
acgtaaacatacgccaaaaca

SEQ ID NO: 6775 - DNA, 21 bp, Artificial Sequence
  Description of Artificial Sequence: Synthetic oligonucleotide
atatcgtggagttgaacgtgg

SEQ ID NO: 6776 - DNA, 28 bp, Artificial Sequence
  Description of Artificial Sequence: Synthetic oligonucleotide
ggcgttgtacggtggtgtcggtgttcga

SEQ ID NO: 6777 - DNA, 24 bp, Artificial Sequence
  Description of Artificial Sequence: Synthetic oligonucleotide
ataaaaccgcctactctaataccg

SEQ ID NO: 6778 - DNA, 20 bp, Artificial Sequence
  Description of Artificial Sequence: Synthetic oligonucleotide
taaatcgcgcccttaaactc

SEQ ID NO: 6779 - DNA, 22 bp, Artificial Sequence
  Description of Artificial Sequence: Synthetic oligonucleotide
gtcgaagagtgatcgaggtatg

SEQ ID NO: 6780 - DNA, 38 bp, Artificial Sequence
  Description of Artificial Sequence: Synthetic oligonucleotide
atgtaggcgttaaaggtggttttaaaaattacgttaga

SEQ ID NO: 6781 - DNA, 24 bp, Artificial Sequence
  Description of Artificial Sequence: Synthetic oligonucleotide
attaacgatggtaggtcgtagttg

SEQ ID NO: 6782 - DNA, 22 bp, Artificial Sequence
  Description of Artificial Sequence: Synthetic oligonucleotide
cgtaaacatacgccaaaacaac

SEQ ID NO: 6783 - DNA, 21 bp, Artificial Sequence
  Description of Artificial Sequence: Synthetic oligonucleotide
tcgaagagtgatcgaggtatg

SEQ ID NO: 6784 - DNA, 22 bp, Artificial Sequence
  Description of Artificial Sequence: Synthetic oligonucleotide
aattaacgatggtaggtcgtag

SEQ ID NO: 6785 - DNA, 19 bp, Artificial Sequence
  Description of Artificial Sequence: Synthetic oligonucleotide
acctatcgccccgaaaata

SEQ ID NO: 6786 - DNA, 19 bp, Artificial Sequence
  Description of Artificial Sequence: Synthetic oligonucleotide
tcgccccgaaaataaaaat

SEQ ID NO: 6787 - DNA, 19 bp, Artificial Sequence
  Description of Artificial Sequence: Synthetic oligonucleotide
gaaacctcgcttaccgaac

SEQ ID NO: 6788 - DNA, 35 bp, Artificial Sequence
  Description of Artificial Sequence: Synthetic oligonucleotide
ggcgttcgcgtttaagatgtaaatcgagttttcgt

SEQ ID NO: 6789 - DNA, 20 bp, Artificial Sequence
  Description of Artificial Sequence: Synthetic oligonucleotide
tatcgtggagttgaacgtgg

SEQ ID NO: 6790 - DNA, 18 bp, Artificial Sequence
  Description of Artificial Sequence: Synthetic oligonucleotide
cgccccgaaaataaaaat

SEQ ID NO: 6791 - DNA, 21 bp, Artificial Sequence
  Description of Artificial Sequence: Synthetic oligonucleotide
cttaaattccaatacgctccg

SEQ ID NO: 6792 - DNA, 19 bp, Artificial Sequence
  Description of Artificial Sequence: Synthetic oligonucleotide
gtaagcgaggtttcgtcgt

SEQ ID NO: 6793 - DNA, 27 bp, Artificial Sequence
  Description of Artificial Sequence: Synthetic oligonucleotide
aggcggttttatttaagtagcgcgcgg

SEQ ID NO: 6794 - DNA, 18 bp, Artificial Sequence
  Description of Artificial Sequence: Synthetic oligonucleotide
cctatcgccccgaaaata

SEQ ID NO: 6795 - DNA, 20 bp, Artificial Sequence
  Description of Artificial Sequence: Synthetic oligonucleotide
aaccgcctactctaataccg

SEQ ID NO: 6796 - DNA, 19 bp, Artificial Sequence
  Description of Artificial Sequence: Synthetic oligonucleotide
ctatcgccccgaaaataaa

SEQ ID NO: 6797 - DNA, 22 bp, Artificial Sequence
  Description of Artificial Sequence: Synthetic oligonucleotide
acgatggtaggtcgtagttgta

SEQ ID NO: 6798 - DNA, 18 bp, Artificial Sequence
  Description of Artificial Sequence: Synthetic oligonucleotide
aatcgcgcccttaaactc

SEQ ID NO: 6799 - DNA, 22 bp, Artificial Sequence
  Description of Artificial Sequence: Synthetic oligonucleotide
ggtcgaagagtgatcgaggtat

SEQ ID NO: 6800 - DNA, 18 bp, Artificial Sequence
  Description of Artificial Sequence: Synthetic oligonucleotide
tcgcttaccgaacgaaaa

SEQ ID NO: 6801 - DNA, 19 bp, Artificial Sequence
  Description of Artificial Sequence: Synthetic oligonucleotide
gtgtacgtgattcggcgtt

SEQ ID NO: 6802 - DNA, 19 bp, Artificial Sequence
  Description of Artificial Sequence: Synthetic oligonucleotide
ctcgcttaccgaacgaaaa

SEQ ID NO: 6803 - DNA, 20 bp, Artificial Sequence
  Description of Artificial Sequence: Synthetic oligonucleotide
tatcgccccgaaaataaaaa

SEQ ID NO: 6804 - DNA, 18 bp, Artificial Sequence
  Description of Artificial Sequence: Synthetic oligonucleotide
tacgtgattcggcgttgt

SEQ ID NO: 6805 - DNA, 18 bp, Artificial Sequence
  Description of Artificial Sequence: Synthetic oligonucleotide
tgtacgtgattcggcgtt

SEQ ID NO: 6806 - DNA, 18 bp, Artificial Sequence
  Description of Artificial Sequence: Synthetic oligonucleotide
cgaaaccgaacgatacga

SEQ ID NO: 6807 - DNA, 22 bp, Artificial Sequence
  Description of Artificial Sequence: Synthetic oligonucleotide
ttacggtattagagtaggcggt

SEQ ID NO: 6808 - DNA, 23 bp, Artificial Sequence
  Description of Artificial Sequence: Synthetic oligonucleotide
gggtaaggcgggcggagcgtatt

SEQ ID NO: 6809 - DNA, 22 bp, Artificial Sequence
  Description of Artificial Sequence: Synthetic oligonucleotide
gttacggtattagagtaggcgg

SEQ ID NO: 6810 - DNA, 22 bp, Artificial Sequence
  Description of Artificial Sequence: Synthetic oligonucleotide
tacggtattagagtaggcggtt

SEQ ID NO: 6811 - DNA, 21 bp, Artificial Sequence
  Description of Artificial Sequence: Synthetic oligonucleotide
aaacgacgaaaaaccactacc

SEQ ID NO: 6812 - DNA, 19 bp, Artificial Sequence
  Description of Artificial Sequence: Synthetic oligonucleotide
tgttattgtttcggttcgg

SEQ ID NO: 6813 - DNA, 33 bp, Artificial Sequence
  Description of Artificial Sequence: Synthetic oligonucleotide
tttgttatggttttggcggatagtatacgtgga

SEQ ID NO: 6814 - DNA, 19 bp, Artificial Sequence
  Description of Artificial Sequence: Synthetic oligonucleotide
aaatcgcgcccttaaactc

SEQ ID NO: 6815 - DNA, 20 bp, Artificial Sequence
  Description of Artificial Sequence: Synthetic oligonucleotide
ttaaattccaatacgctccg

SEQ ID NO: 6816 - DNA, 19 bp, Artificial Sequence
  Description of Artificial Sequence: Synthetic oligonucleotide
tagtagtttcgcgtggcgt

SEQ ID NO: 6817 - DNA, 19 bp, Artificial Sequence
  Description of Artificial Sequence: Synthetic oligonucleotide
gttcggtaagcgaggtttc

SEQ ID NO: 6818 - DNA, 21 bp, Artificial Sequence
  Description of Artificial Sequence: Synthetic oligonucleotide
cgcgctacactcaaaaactac

SEQ ID NO: 6819 - DNA, 18 bp, Artificial Sequence
  Description of Artificial Sequence: Synthetic oligonucleotide
tcgtatcgttcggtttcg

SEQ ID NO: 6820 - DNA, 30 bp, Artificial Sequence
  Description of Artificial Sequence: Synthetic oligonucleotide
ggcggggcgtagggttgagcgagcgttcgg

SEQ ID NO: 6821 - DNA, 20 bp, Artificial Sequence
  Description of Artificial Sequence: Synthetic oligonucleotide
aagagtgatcgaggtatgcg

SEQ ID NO: 6822 - DNA, 18 bp, Artificial Sequence
  Description of Artificial Sequence: Synthetic oligonucleotide
aggtgtacgtgattcggc

SEQ ID NO: 6823 - DNA, 37 bp, Artificial Sequence
  Description of Artificial Sequence: Synthetic oligonucleotide
gttcgcgtttaagatgtaaatcgagttttcgtttttt

SEQ ID NO: 6824 - DNA, 18 bp, Artificial Sequence
  Description of Artificial Sequence: Synthetic oligonucleotide
gacaccaccgtacaacgc

SEQ ID NO: 6825 - DNA, 22 bp, Artificial Sequence
  Description of Artificial Sequence: Synthetic oligonucleotide
atacgtggattatttaacgggg

SEQ ID NO: 6826 - DNA, 28 bp, Artificial Sequence
  Description of Artificial Sequence: Synthetic oligonucleotide
ttcgatatcgtggagttgaacgtggggg

SEQ ID NO: 6827 - DNA, 19 bp, Artificial Sequence
  Description of Artificial Sequence: Synthetic oligonucleotide
cgtggattatttaacgggg

SEQ ID NO: 6828 - DNA, 19 bp, Artificial Sequence
  Description of Artificial Sequence: Synthetic oligonucleotide
gcggtagtggtttttcgtc

SEQ ID NO: 6829 - DNA, 20 bp, Artificial Sequence
  Description of Artificial Sequence: Synthetic oligonucleotide
aaaacaacgaatcgaacacc

SEQ ID NO: 6830 - DNA, 20 bp, Artificial Sequence
  Description of Artificial Sequence: Synthetic oligonucleotide
gtttttcgcggagttatcgt

SEQ ID NO: 6831 - DNA, 24 bp, Artificial Sequence
  Description of Artificial Sequence: Synthetic oligonucleotide
aattaacgatggtaggtcgtagtt

SEQ ID NO: 6832 - DNA, 19 bp, Artificial Sequence
  Description of Artificial Sequence: Synthetic oligonucleotide
gttagtagtttcgcgtggc

SEQ ID NO: 6833 - DNA, 19 bp, Artificial Sequence
  Description of Artificial Sequence: Synthetic oligonucleotide
atcgtggagttgaacgtgg

SEQ ID NO: 6834 - DNA, 18 bp, Artificial Sequence
  Description of Artificial Sequence: Synthetic oligonucleotide
cgtacaacgccgaatcac

SEQ ID NO: 6835 - DNA, 18 bp, Artificial Sequence
  Description of Artificial Sequence: Synthetic oligonucleotide
gtacaacgccgaatcacg

SEQ ID NO: 6836 - DNA, 18 bp, Artificial Sequence
  Description of Artificial Sequence: Synthetic oligonucleotide
tttttgagtgtagcgcgg

SEQ ID NO: 6837 - DNA, 19 bp, Artificial Sequence
  Description of Artificial Sequence: Synthetic oligonucleotide
taagcgaggtttcgtcgtc

SEQ ID NO: 6838 - DNA, 19 bp, Artificial Sequence
  Description of Artificial Sequence: Synthetic oligonucleotide
tttttcgcggagttatcgt

SEQ ID NO: 6839 - DNA, 19 bp, Artificial Sequence
  Description of Artificial Sequence: Synthetic oligonucleotide
ttcgcggagttatcgtttt

SEQ ID NO: 6840 - DNA, 19 bp, Artificial Sequence
  Description of Artificial Sequence: Synthetic oligonucleotide
ttttcgcggagttatcgtt

SEQ ID NO: 6841 - DNA, 19 bp, Artificial Sequence
  Description of Artificial Sequence: Synthetic oligonucleotide
cgtttttcgcggagttatc

SEQ ID NO: 6842 - DNA, 17 bp, Artificial Sequence
  Description of Artificial Sequence: Synthetic oligonucleotide
cgctatacgccccctta

SEQ ID NO: 6843 - DNA, 22 bp, Artificial Sequence
  Description of Artificial Sequence: Synthetic oligonucleotide
cgcgttacggtattagagtagg

SEQ ID NO: 6844 - DNA, 22 bp, Artificial Sequence
  Description of Artificial Sequence: Synthetic oligonucleotide
ttatttttgttttcgtcggttc

SEQ ID NO: 6845 - DNA, 22 bp, Artificial Sequence
  Description of Artificial Sequence: Synthetic oligonucleotide
atacatctcccgaatacgctaa

SEQ ID NO: 6846 - DNA, 21 bp, Artificial Sequence
  Description of Artificial Sequence: Synthetic oligonucleotide
ttcgcgcgggggatacggggt

SEQ ID NO: 6847 - DNA, 22 bp, Artificial Sequence
  Description of Artificial Sequence: Synthetic oligonucleotide
aatacatctcccgaatacgcta

SEQ ID NO: 6848 - DNA, 22 bp, Artificial Sequence
  Description of Artificial Sequence: Synthetic oligonucleotide
aatttatttttgttttcgtcgg

SEQ ID NO: 6849 - DNA, 22 bp, Artificial Sequence
  Description of Artificial Sequence: Synthetic oligonucleotide
aaatacatctcccgaatacgct

SEQ ID NO: 6850 - DNA, 22 bp, Artificial Sequence
  Description of Artificial Sequence: Synthetic oligonucleotide
atttatttttgttttcgtcggt

SEQ ID NO: 6851 - DNA, 22 bp, Artificial Sequence
  Description of Artificial Sequence: Synthetic oligonucleotide
tacatctcccgaatacgctaaa

SEQ ID NO: 6852 - DNA, 23 bp, Artificial Sequence
  Description of Artificial Sequence: Synthetic oligonucleotide
taatttatttttgttttcgtcgg

SEQ ID NO: 6853 - DNA, 21 bp, Artificial Sequence
  Description of Artificial Sequence: Synthetic oligonucleotide
tacatctcccgaatacgctaa

SEQ ID NO: 6854 - DNA, 21 bp, Artificial Sequence
  Description of Artificial Sequence: Synthetic oligonucleotide
tttttgagtatcgagtgcgtg

SEQ ID NO: 6855 - DNA, 22 bp, Artificial Sequence
  Description of Artificial Sequence: Synthetic oligonucleotide
acgacccgaacaaaactaaata

SEQ ID NO: 6856 - DNA, 21 bp, Artificial Sequence
  Description of Artificial Sequence: Synthetic oligonucleotide
ttcgcggttggcgggtgggga

SEQ ID NO: 6857 - DNA, 20 bp, Artificial Sequence
  Description of Artificial Sequence: Synthetic oligonucleotide
tttgagtatcgagtgcgtga

SEQ ID NO: 6858 - DNA, 22 bp, Artificial Sequence
  Description of Artificial Sequence: Synthetic oligonucleotide
cgacccgaacaaaactaaatac

SEQ ID NO: 6859 - DNA, 21 bp, Artificial Sequence
  Description of Artificial Sequence: Synthetic oligonucleotide
tatttttgttttcgtcggttc

SEQ ID NO: 6860 - DNA, 21 bp, Artificial Sequence
  Description of Artificial Sequence: Synthetic oligonucleotide
acatctcccgaatacgctaaa

SEQ ID NO: 6861 - DNA, 24 bp, Artificial Sequence
  Description of Artificial Sequence: Synthetic oligonucleotide
gtaatttatttttgttttcgtcgg

SEQ ID NO: 6862 - DNA, 22 bp, Artificial Sequence
  Description of Artificial Sequence: Synthetic oligonucleotide
tcgtagagtcggttaaggtgat

SEQ ID NO: 6863 - DNA, 20 bp, Artificial Sequence
  Description of Artificial Sequence: Synthetic oligonucleotide
cgaatctcaaacattcctcg

SEQ ID NO: 6864 - DNA, 39 bp, Artificial Sequence
  Description of Artificial Sequence: Synthetic oligonucleotide
ggttgtagtatattagttcggggttgattttttcgtaag

SEQ ID NO: 6865 - DNA, 22 bp, Artificial Sequence
  Description of Artificial Sequence: Synthetic oligonucleotide
tagtttgtagtttaggcggtcg

SEQ ID NO: 6866 - DNA, 21 bp, Artificial Sequence
  Description of Artificial Sequence: Synthetic oligonucleotide
cacgcactcgatactcaaaaa

SEQ ID NO: 6867 - DNA, 22 bp, Artificial Sequence
  Description of Artificial Sequence: Synthetic oligonucleotide
aggaggtacgcggtgcgcgttt

SEQ ID NO: 6868 - DNA, 23 bp, Artificial Sequence
  Description of Artificial Sequence: Synthetic oligonucleotide
ttagtaatttcggtttttcgttt

SEQ ID NO: 6869 - DNA, 22 bp, Artificial Sequence
  Description of Artificial Sequence: Synthetic oligonucleotide
tctcccgaatacgctaaaaata

SEQ ID NO: 6870 - DNA, 20 bp, Artificial Sequence
  Description of Artificial Sequence: Synthetic oligonucleotide
ttgagtatcgagtgcgtgag

SEQ ID NO: 6871 - DNA, 21 bp, Artificial Sequence
  Description of Artificial Sequence: Synthetic oligonucleotide
tttatttttgttttcgtcggt

SEQ ID NO: 6872 - DNA, 21 bp, Artificial Sequence
  Description of Artificial Sequence: Synthetic oligonucleotide
ttttgagtatcgagtgcgtga

SEQ ID NO: 6873 - DNA, 20 bp, Artificial Sequence
  Description of Artificial Sequence: Synthetic oligonucleotide
catctcccgaatacgctaaa

SEQ ID NO: 6874 - DNA, 23 bp, Artificial Sequence
  Description of Artificial Sequence: Synthetic oligonucleotide
tttagtaatttcggtttttcgtt

SEQ ID NO: 6875 - DNA, 23 bp, Artificial Sequence
  Description of Artificial Sequence: Synthetic oligonucleotide
ttttagtaatttcggtttttcgt

SEQ ID NO: 6876 - DNA, 20 bp, Artificial Sequence
  Description of Artificial Sequence: Synthetic oligonucleotide
ggtagtaggaggtacgcggt

SEQ ID NO: 6877 - DNA, 22 bp, Artificial Sequence
  Description of Artificial Sequence: Synthetic oligonucleotide
gaaacgaatctaaaaacgctca

SEQ ID NO: 6878 - DNA, 30 bp, Artificial Sequence
  Description of Artificial Sequence: Synthetic oligonucleotide
gtcgcgggattttacggtttggagtagtag

SEQ ID NO: 6879 - DNA, 20 bp, Artificial Sequence
  Description of Artificial Sequence: Synthetic oligonucleotide
acatctcccgaatacgctaa

SEQ ID NO: 6880 - DNA, 22 bp, Artificial Sequence
  Description of Artificial Sequence: Synthetic oligonucleotide
tagtaatttcggtttttcgttt

SEQ ID NO: 6881 - DNA, 20 bp, Artificial Sequence
  Description of Artificial Sequence: Synthetic oligonucleotide
ctcacgcactcgatactcaa

SEQ ID NO: 6882 - DNA, 21 bp, Artificial Sequence
  Description of Artificial Sequence: Synthetic oligonucleotide
tcacgcactcgatactcaaaa

SEQ ID NO: 6883 - DNA, 19 bp, Artificial Sequence
  Description of Artificial Sequence: Synthetic oligonucleotide
agaggtcgtttggcgttag

SEQ ID NO: 6884 - DNA, 22 bp, Artificial Sequence
  Description of Artificial Sequence: Synthetic oligonucleotide
ctataaaatacgcgactccgac

SEQ ID NO: 6885 - DNA, 25 bp, Artificial Sequence
  Description of Artificial Sequence: Synthetic oligonucleotide
ggtcgtagtcgtcgcgttcggttgg

SEQ ID NO: 6886 - DNA, 22 bp, Artificial Sequence
  Description of Artificial Sequence: Synthetic oligonucleotide
cgtagagtcggttaaggtgatg

SEQ ID NO: 6887 - DNA, 22 bp, Artificial Sequence
  Description of Artificial Sequence: Synthetic oligonucleotide
ttagtaatttcggtttttcgtt

SEQ ID NO: 6888 - DNA, 20 bp, Artificial Sequence
  Description of Artificial Sequence: Synthetic oligonucleotide
gtagtaggaggtacgcggtg

SEQ ID NO: 6889 - DNA, 22 bp, Artificial Sequence
  Description of Artificial Sequence: Synthetic oligonucleotide
atctcccgaatacgctaaaaat

SEQ ID NO: 6890 - DNA, 22 bp, Artificial Sequence
  Description of Artificial Sequence: Synthetic oligonucleotide
ttcgtagagtcggttaaggtga

SEQ ID NO: 6891 - DNA, 21 bp, Artificial Sequence
  Description of Artificial Sequence: Synthetic oligonucleotide
ggtcgggtagtaggaggtacg

SEQ ID NO: 6892 - DNA, 22 bp, Artificial Sequence
  Description of Artificial Sequence: Synthetic oligonucleotide
aaacgaatctaaaaacgctcac

SEQ ID NO: 6893 - DNA, 22 bp, Artificial Sequence
  Description of Artificial Sequence: Synthetic oligonucleotide
ctcccgaatacgctaaaaataa

SEQ ID NO: 6894 - DNA, 20 bp, Artificial Sequence
  Description of Artificial Sequence: Synthetic oligonucleotide
aagaggtcgtttggcgttag

SEQ ID NO: 6895 - DNA, 22 bp, Artificial Sequence
  Description of Artificial Sequence: Synthetic oligonucleotide
gacgacccgaacaaaactaaat

SEQ ID NO: 6896 - DNA, 20 bp, Artificial Sequence
  Description of Artificial Sequence: Synthetic oligonucleotide
cggtcgggtagtaggaggta

SEQ ID NO: 6897 - DNA, 20 bp, Artificial Sequence
  Description of Artificial Sequence: Synthetic oligonucleotide
atttttgttttcgtcggttc

SEQ ID NO: 6898 - DNA, 21 bp, Artificial Sequence
  Description of Artificial Sequence: Synthetic oligonucleotide
agtttgtagtttaggcggtcg

SEQ ID NO: 6899 - DNA, 25 bp, Artificial Sequence
  Description of Artificial Sequence: Synthetic oligonucleotide
cgtgtaatttatttttgttttcgtc

SEQ ID NO: 6900 - DNA, 20 bp, Artificial Sequence
  Description of Artificial Sequence: Synthetic oligonucleotide
gtagtttaggcggtcgggta

SEQ ID NO: 6901 - DNA, 22 bp, Artificial Sequence
  Description of Artificial Sequence: Synthetic oligonucleotide
ttttagtaatttcggtttttcg

SEQ ID NO: 6902 - DNA, 19 bp, Artificial Sequence
  Description of Artificial Sequence: Synthetic oligonucleotide
ttaggcggtcgggtagtag

SEQ ID NO: 6903 - DNA, 22 bp, Artificial Sequence
  Description of Artificial Sequence: Synthetic oligonucleotide
aggtacgcggtgcgcgtttcgt

SEQ ID NO: 6904 - DNA, 20 bp, Artificial Sequence
  Description of Artificial Sequence: Synthetic oligonucleotide
tcgggtagtaggaggtacgc

SEQ ID NO: 6905 - DNA, 20 bp, Artificial Sequence
  Description of Artificial Sequence: Synthetic oligonucleotide
tagtttaggcggtcgggtag

SEQ ID NO: 6906 - DNA, 20 bp, Artificial Sequence
  Description of Artificial Sequence: Synthetic oligonucleotide
tttaggcggtcgggtagtag

SEQ ID NO: 6907 - DNA, 21 bp, Artificial Sequence
  Description of Artificial Sequence: Synthetic oligonucleotide
acgcttaaaatacatctcccg

SEQ ID NO: 6908 - DNA, 21 bp, Artificial Sequence
  Description of Artificial Sequence: Synthetic oligonucleotide
cgaaacgaatctaaaaacgct

SEQ ID NO: 6909 - DNA, 19 bp, Artificial Sequence
  Description of Artificial Sequence: Synthetic oligonucleotide
taaaaacgctcacgcactc

SEQ ID NO: 6910 - DNA, 20 bp, Artificial Sequence
  Description of Artificial Sequence: Synthetic oligonucleotide
agtgcgtgagcgtttttaga

SEQ ID NO: 6911 - DNA, 22 bp, Artificial Sequence
  Description of Artificial Sequence: Synthetic oligonucleotide
cgatacgaaataccaaaaatca

SEQ ID NO: 6912 - DNA, 19 bp, Artificial Sequence
  Description of Artificial Sequence: Synthetic oligonucleotide
gaaattatcggttcggtcg

SEQ ID NO: 6913 - DNA, 22 bp, Artificial Sequence
  Description of Artificial Sequence: Synthetic oligonucleotide
aatctaaaatccgaaaacgaaa

SEQ ID NO: 6914 - DNA, 27 bp, Artificial Sequence
  Description of Artificial Sequence: Synthetic oligonucleotide
agtttatagggcggggggcgattatgt

SEQ ID NO: 6915 - DNA, 22 bp, Artificial Sequence
  Description of Artificial Sequence: Synthetic oligonucleotide
aaatctaaaatccgaaaacgaa

SEQ ID NO: 6916 - DNA, 22 bp, Artificial Sequence
  Description of Artificial Sequence: Synthetic oligonucleotide
aaaatacatctcccgaatacgc

SEQ ID NO: 6917 - DNA, 21 bp, Artificial Sequence
  Description of Artificial Sequence: Synthetic oligonucleotide
aattaaaaacaaaaccgcgaa

SEQ ID NO: 6918 - DNA, 21 bp, Artificial Sequence
  Description of Artificial Sequence: Synthetic oligonucleotide
ttttagtcgggttagtcgagc

SEQ ID NO: 6919 - DNA, 23 bp, Artificial Sequence
  Description of Artificial Sequence: Synthetic oligonucleotide
gaggagcggagcgtcgaggttgg

SEQ ID NO: 6920 - DNA, 21 bp, Artificial Sequence
  Description of Artificial Sequence: Synthetic oligonucleotide
aaattaaaaacaaaaccgcga

SEQ ID NO: 6921 - DNA, 22 bp, Artificial Sequence
  Description of Artificial Sequence: Synthetic oligonucleotide
ttaaaacggttatcggaggtag

SEQ ID NO: 6922 - DNA, 22 bp, Artificial Sequence
  Description of Artificial Sequence: Synthetic oligonucleotide
tactaaacaaaatcccgaaacg

SEQ ID NO: 6923 - DNA, 29 bp, Artificial Sequence
  Description of Artificial Sequence: Synthetic oligonucleotide
attagtcggtcgagggtcgagtttcgcgg

SEQ ID NO: 6924 - DNA, 22 bp, Artificial Sequence
  Description of Artificial Sequence: Synthetic oligonucleotide
taggttgttttagtcggtcgtt

SEQ ID NO: 6925 - DNA, 22 bp, Artificial Sequence
  Description of Artificial Sequence: Synthetic oligonucleotide
tccgataaccgttttaatatcc

SEQ ID NO: 6926 - DNA, 38 bp, Artificial Sequence
  Description of Artificial Sequence: Synthetic oligonucleotide
gtcgcggcgattggcgataagttattagttatttacga

SEQ ID NO: 6927 - DNA, 22 bp, Artificial Sequence
  Description of Artificial Sequence: Synthetic oligonucleotide
ttaggttgttttagtcggtcgt

SEQ ID NO: 6928 - DNA, 22 bp, Artificial Sequence
  Description of Artificial Sequence: Synthetic oligonucleotide
gttaggttgttttagtcggtcg

SEQ ID NO: 6929 - DNA, 23 bp, Artificial Sequence
  Description of Artificial Sequence: Synthetic oligonucleotide
ctccgataaccgttttaatatcc

SEQ ID NO: 6930 - DNA, 23 bp, Artificial Sequence
  Description of Artificial Sequence: Synthetic oligonucleotide
cctccgataaccgttttaatatc

SEQ ID NO: 6931 - DNA, 22 bp, Artificial Sequence
  Description of Artificial Sequence: Synthetic oligonucleotide
tacctccgataaccgttttaat

SEQ ID NO: 6932 - DNA, 23 bp, Artificial Sequence
  Description of Artificial Sequence: Synthetic oligonucleotide
aaccgttttaatatcctaatcgc

SEQ ID NO: 6933 - DNA, 23 bp, Artificial Sequence
  Description of Artificial Sequence: Synthetic oligonucleotide
gatattaaaacggttatcggagg

SEQ ID NO: 6934 - DNA, 23 bp, Artificial Sequence
  Description of Artificial Sequence: Synthetic oligonucleotide
ctacctccgataaccgttttaat

SEQ ID NO: 6935 - DNA, 22 bp, Artificial Sequence
  Description of Artificial Sequence: Synthetic oligonucleotide
attaaaacggttatcggaggta

SEQ ID NO: 6936 - DNA, 22 bp, Artificial Sequence
  Description of Artificial Sequence: Synthetic oligonucleotide
ccgttttaatatcctaatcgct

SEQ ID NO: 6937 - DNA, 22 bp, Artificial Sequence
  Description of Artificial Sequence: Synthetic oligonucleotide
gtatattagtcggtcgagggtc

SEQ ID NO: 6938 - DNA, 27 bp, Artificial Sequence
  Description of Artificial Sequence: Synthetic oligonucleotide
gtttcgcgggcggtagtaagttttggg

SEQ ID NO: 6939 - DNA, 23 bp, Artificial Sequence
  Description of Artificial Sequence: Synthetic oligonucleotide
agtatattagtcggtcgagggtc

SEQ ID NO: 6940 - DNA, 22 bp, Artificial Sequence
  Description of Artificial Sequence: Synthetic oligonucleotide
gttttagtcggtcgttgttgtc

SEQ ID NO: 6941 - DNA, 36 bp, Artificial Sequence
  Description of Artificial Sequence: Synthetic oligonucleotide
ggcgattggcgataagttattagttatttacgatgg

SEQ ID NO: 6942 - DNA, 22 bp, Artificial Sequence
  Description of Artificial Sequence: Synthetic oligonucleotide
accgttttaatatcctaatcgc

SEQ ID NO: 6943 - DNA, 22 bp, Artificial Sequence
  Description of Artificial Sequence: Synthetic oligonucleotide
taaaacggttatcggaggtagg

SEQ ID NO: 6944 - DNA, 22 bp, Artificial Sequence
  Description of Artificial Sequence: Synthetic oligonucleotide
ccgataaccgttttaatatcct

SEQ ID NO: 6945 - DNA, 21 bp, Artificial Sequence
  Description of Artificial Sequence: Synthetic oligonucleotide
actaaacaaaatcccgaaacg

SEQ ID NO: 6946 - DNA, 22 bp, Artificial Sequence
  Description of Artificial Sequence: Synthetic oligonucleotide
atattaaaacggttatcggagg

SEQ ID NO: 6947 - DNA, 21 bp, Artificial Sequence
  Description of Artificial Sequence: Synthetic oligonucleotide
ttttagtcggtcgttgttgtc

SEQ ID NO: 6948 - DNA, 21 bp, Artificial Sequence
  Description of Artificial Sequence: Synthetic oligonucleotide
aggttgttttagtcggtcgtt

SEQ ID NO: 6949 - DNA, 21 bp, Artificial Sequence
  Description of Artificial Sequence: Synthetic oligonucleotide
aaacggttatcggaggtaggt

SEQ ID NO: 6950 - DNA, 24 bp, Artificial Sequence
  Description of Artificial Sequence: Synthetic oligonucleotide
taaccgttttaatatcctaatcgc

SEQ ID NO: 6951 - DNA, 23 bp, Artificial Sequence
  Description of Artificial Sequence: Synthetic oligonucleotide
tattaaaacggttatcggaggta

SEQ ID NO: 6952 - DNA, 21 bp, Artificial Sequence
  Description of Artificial Sequence: Synthetic oligonucleotide
acctccgataaccgttttaat

SEQ ID NO: 6953 - DNA, 21 bp, Artificial Sequence
  Description of Artificial Sequence: Synthetic oligonucleotide
ttgttttagtcggtcgttgtt

SEQ ID NO: 6954 - DNA, 21 bp, Artificial Sequence
  Description of Artificial Sequence: Synthetic oligonucleotide
tgttttagtcggtcgttgttg

SEQ ID NO: 6955 - DNA, 21 bp, Artificial Sequence
  Description of Artificial Sequence: Synthetic oligonucleotide
aaaacggttatcggaggtagg

SEQ ID NO: 6956 - DNA, 21 bp, Artificial Sequence
  Description of Artificial Sequence: Synthetic oligonucleotide
ctaaacaaaatcccgaaacga

SEQ ID NO: 6957 - DNA, 20 bp, Artificial Sequence
  Description of Artificial Sequence: Synthetic oligonucleotide
taaacaaaatcccgaaacga

SEQ ID NO: 6958 - DNA, 23 bp, Artificial Sequence
  Description of Artificial Sequence: Synthetic oligonucleotide
ctactaaacaaaatcccgaaacg

SEQ ID NO: 6959 - DNA, 20 bp, Artificial Sequence
  Description of Artificial Sequence: Synthetic oligonucleotide
aacggttatcggaggtaggt

SEQ ID NO: 6960 - DNA, 21 bp, Artificial Sequence
  Description of Artificial Sequence: Synthetic oligonucleotide
atcgcttactcttcttcgcct

SEQ ID NO: 6961 - DNA, 23 bp, Artificial Sequence
  Description of Artificial Sequence: Synthetic oligonucleotide
ggatattaaaacggttatcggag

SEQ ID NO: 6962 - DNA, 22 bp, Artificial Sequence
  Description of Artificial Sequence: Synthetic oligonucleotide
actaaacaaaatcccgaaacga

SEQ ID NO: 6963 - DNA, 20 bp, Artificial Sequence
  Description of Artificial Sequence: Synthetic oligonucleotide
acaaaatcccgaaacgaaat

SEQ ID NO: 6964 - DNA, 22 bp, Artificial Sequence
  Description of Artificial Sequence: Synthetic oligonucleotide
tattaaaacggttatcggaggt

SEQ ID NO: 6965 - DNA, 21 bp, Artificial Sequence
  Description of Artificial Sequence: Synthetic oligonucleotide
gttgttttagtcggtcgttgt

SEQ ID NO: 6966 - DNA, 21 bp, Artificial Sequence
  Description of Artificial Sequence: Synthetic oligonucleotide
aacaaaatcccgaaacgaaat

SEQ ID NO: 6967 - DNA, 25 bp, Artificial Sequence
  Description of Artificial Sequence: Synthetic oligonucleotide
ataaccgttttaatatcctaatcgc

SEQ ID NO: 6968 - DNA, 21 bp, Artificial Sequence
  Description of Artificial Sequence: Synthetic oligonucleotide
ggttgttttagtcggtcgttg

SEQ ID NO: 6969 - DNA, 21 bp, Artificial Sequence
  Description of Artificial Sequence: Synthetic oligonucleotide
tatattagtcggtcgagggtc

SEQ ID NO: 6970 - DNA, 19 bp, Artificial Sequence
  Description of Artificial Sequence: Synthetic oligonucleotide
tcgcttactcttcttcgcc

SEQ ID NO: 6971 - DNA, 20 bp, Artificial Sequence
  Description of Artificial Sequence: Synthetic oligonucleotide
cgcttactcttcttcgcctc

SEQ ID NO: 6972 - DNA, 23 bp, Artificial Sequence
  Description of Artificial Sequence: Synthetic oligonucleotide
aagcgattaggatattaaaacgg

SEQ ID NO: 6973 - DNA, 21 bp, Artificial Sequence
  Description of Artificial Sequence: Synthetic oligonucleotide
ttaggttgttttagtcggtcg

SEQ ID NO: 6974 - DNA, 19 bp, Artificial Sequence
  Description of Artificial Sequence: Synthetic oligonucleotide
aaacaaaatcccgaaacga

SEQ ID NO: 6975 - DNA, 20 bp, Artificial Sequence
  Description of Artificial Sequence: Synthetic oligonucleotide
aatcgcttactcttcttcgc

SEQ ID NO: 6976 - DNA, 22 bp, Artificial Sequence
  Description of Artificial Sequence: Synthetic oligonucleotide
atagaagatcgaaaggtgtcgg

SEQ ID NO: 6977 - DNA, 24 bp, Artificial Sequence
  Description of Artificial Sequence: Synthetic oligonucleotide
cgaaaaataaaacgtaccaatctt

SEQ ID NO: 6978 - DNA, 35 bp, Artificial Sequence
  Description of Artificial Sequence: Synthetic oligonucleotide
ttcgggttttagtagggttaagtcgttatagtgtg

SEQ ID NO: 6979 - DNA, 22 bp, Artificial Sequence
  Description of Artificial Sequence: Synthetic oligonucleotide
agcgattaggatattaaaacgg

SEQ ID NO: 6980 - DNA, 19 bp, Artificial Sequence
  Description of Artificial Sequence: Synthetic oligonucleotide
ccgaaaaataccgaacgac

SEQ ID NO: 6981 - DNA, 22 bp, Artificial Sequence
  Description of Artificial Sequence: Synthetic oligonucleotide
tacggagagtagggcgtattag

SEQ ID NO: 6982 - DNA, 33 bp, Artificial Sequence
  Description of Artificial Sequence: Synthetic oligonucleotide
tattgtggcggtttagttttgttggagttcgga

SEQ ID NO: 6983 - DNA, 22 bp, Artificial Sequence
  Description of Artificial Sequence: Synthetic oligonucleotide
gacgtttgtcggttagaggtag

SEQ ID NO: 6984 - DNA, 22 bp, Artificial Sequence
  Description of Artificial Sequence: Synthetic oligonucleotide
aaaatctaaaacttccgctcgt

SEQ ID NO: 6985 - DNA, 35 bp, Artificial Sequence
  Description of Artificial Sequence: Synthetic oligonucleotide
agtttggtaggcgagtttaaattcggaaagatagt

SEQ ID NO: 6986 - DNA, 22 bp, Artificial Sequence
  Description of Artificial Sequence: Synthetic oligonucleotide
ttttagttatgttagcggcgac

SEQ ID NO: 6987 - DNA, 22 bp, Artificial Sequence
  Description of Artificial Sequence: Synthetic oligonucleotide
aaaaactacgacctaaacgcaa

SEQ ID NO: 6988 - DNA, 25 bp, Artificial Sequence
  Description of Artificial Sequence: Synthetic oligonucleotide
ttcggcgcgtcgttaggatggtcga

SEQ ID NO: 6989 - DNA, 22 bp, Artificial Sequence
  Description of Artificial Sequence: Synthetic oligonucleotide
aaatctaaaacttccgctcgta

SEQ ID NO: 6990 - DNA, 22 bp, Artificial Sequence
  Description of Artificial Sequence: Synthetic oligonucleotide
ctaaaacttccgctcgtaattc

SEQ ID NO: 6991 - DNA, 22 bp, Artificial Sequence
  Description of Artificial Sequence: Synthetic oligonucleotide
aaaactacgacctaaacgcaac

SEQ ID NO: 6992 - DNA, 22 bp, Artificial Sequence
  Description of Artificial Sequence: Synthetic oligonucleotide
atttgtagttcggacgtttgtc

SEQ ID NO: 6993 - DNA, 22 bp, Artificial Sequence
  Description of Artificial Sequence: Synthetic oligonucleotide
cgctcgtaattcctcttaaact

SEQ ID NO: 6994 - DNA, 42 bp, Artificial Sequence
  Description of Artificial Sequence: Synthetic oligonucleotide
gtagcgggaattttgtatatagtttggtaggcgagtttaaat

SEQ ID NO: 6995 - DNA, 22 bp, Artificial Sequence
  Description of Artificial Sequence: Synthetic oligonucleotide
ttgatcgttgagtagtagcgag

SEQ ID NO: 6996 - DNA, 22 bp, Artificial Sequence
  Description of Artificial Sequence: Synthetic oligonucleotide
atcgacaaaataaaatacgcga

SEQ ID NO: 6997 - DNA, 38 bp, Artificial Sequence
  Description of Artificial Sequence: Synthetic oligonucleotide
ttcgttcgtggagtcgtatatacgttttttattagagg

SEQ ID NO: 6998 - DNA, 23 bp, Artificial Sequence
  Description of Artificial Sequence: Synthetic oligonucleotide
tggtagaattttcgtttgttacg

SEQ ID NO: 6999 - DNA, 22 bp, Artificial Sequence
  Description of Artificial Sequence: Synthetic oligonucleotide
gaacgcaactacgccttaatac

SEQ ID NO: 7000 - DNA, 33 bp, Artificial Sequence
  Description of Artificial Sequence: Synthetic oligonucleotide
gaggttcgggttcgattttcggtttatgtagta

SEQ ID NO: 7001 - DNA, 23 bp, Artificial Sequence
  Description of Artificial Sequence: Synthetic oligonucleotide
aatctaaaacttccgctcgtaat

SEQ ID NO: 7002 - DNA, 21 bp, Artificial Sequence
  Description of Artificial Sequence: Synthetic oligonucleotide
gcggtagagaaagcgtaagat

SEQ ID NO: 7003 - DNA, 22 bp, Artificial Sequence
  Description of Artificial Sequence: Synthetic oligonucleotide
actaacccgataaaacgaacaa

SEQ ID NO: 7004 - DNA, 31 bp, Artificial Sequence
  Description of Artificial Sequence: Synthetic oligonucleotide
ttcgttttaggtttttcgacgtgacgagagt

SEQ ID NO: 7005 - DNA, 22 bp, Artificial Sequence
  Description of Artificial Sequence: Synthetic oligonucleotide
aactaacccgataaaacgaaca

SEQ ID NO: 7006 - DNA, 21 bp, Artificial Sequence
  Description of Artificial Sequence: Synthetic oligonucleotide
tcgtcggttgtcgtagaaata

SEQ ID NO: 7007 - DNA, 22 bp, Artificial Sequence
  Description of Artificial Sequence: Synthetic oligonucleotide
aaaacgtctatccgaaaaacaa

SEQ ID NO: 7008 - DNA, 33 bp, Artificial Sequence
  Description of Artificial Sequence: Synthetic oligonucleotide
tttaggattatgcgttagcgttcgcgatttttt

SEQ ID NO: 7009 - DNA, 22 bp, Artificial Sequence
  Description of Artificial Sequence: Synthetic oligonucleotide
ctaacccgataaaacgaacaaa

SEQ ID NO: 7010 - DNA, 22 bp, Artificial Sequence
  Description of Artificial Sequence: Synthetic oligonucleotide
cacgaaaaactaacccgataaa

SEQ ID NO: 7011 - DNA, 22 bp, Artificial Sequence
  Description of Artificial Sequence: Synthetic oligonucleotide
attacaacgtccacgaaaaact

SEQ ID NO: 7012 - DNA, 22 bp, Artificial Sequence
  Description of Artificial Sequence: Synthetic oligonucleotide
gaaaatctaaaacttccgctcg

SEQ ID NO: 7013 - DNA, 22 bp, Artificial Sequence
  Description of Artificial Sequence: Synthetic oligonucleotide
tgtaataggacggaggtttacg

SEQ ID NO: 7014 - DNA, 21 bp, Artificial Sequence
  Description of Artificial Sequence: Synthetic oligonucleotide
ccaacgaaaactaacacaacg

SEQ ID NO: 7015 - DNA, 22 bp, Artificial Sequence
  Description of Artificial Sequence: Synthetic oligonucleotide
agtgaacggcggttggtggcga

SEQ ID NO: 7016 - DNA, 22 bp, Artificial Sequence
  Description of Artificial Sequence: Synthetic oligonucleotide
ccgctcgtaattcctcttaaac

SEQ ID NO: 7017 - DNA, 22 bp, Artificial Sequence
  Description of Artificial Sequence: Synthetic oligonucleotide
gtttatcgttttgaatcgtcgt

SEQ ID NO: 7018 - DNA, 21 bp, Artificial Sequence
  Description of Artificial Sequence: Synthetic oligonucleotide
aacgaatcgctcgctactact

SEQ ID NO: 7019 - DNA, 30 bp, Artificial Sequence
  Description of Artificial Sequence: Synthetic oligonucleotide
aggcgttttggtttgaatagttcgttcggt

SEQ ID NO: 7020 - DNA, 23 bp, Artificial Sequence
  Description of Artificial Sequence: Synthetic oligonucleotide
cgtaacaaacgaaaattctacca

SEQ ID NO: 7021 - DNA, 28 bp, Artificial Sequence
  Description of Artificial Sequence: Synthetic oligonucleotide
ggttggtggcgagtttcgttgtgttagt

SEQ ID NO: 7022 - DNA, 22 bp, Artificial Sequence
  Description of Artificial Sequence: Synthetic oligonucleotide
ttgtcggtttatttgtagttcg

SEQ ID NO: 7023 - DNA, 22 bp, Artificial Sequence
  Description of Artificial Sequence: Synthetic oligonucleotide
cgcgtaacaaacgaaaattcta

SEQ ID NO: 7024 - DNA, 22 bp, Artificial Sequence
  Description of Artificial Sequence: Synthetic oligonucleotide
tgtcggtttatttgtagttcgg

SEQ ID NO: 7025 - DNA, 22 bp, Artificial Sequence
  Description of Artificial Sequence: Synthetic oligonucleotide
aaataaaatacgcgaccgaaat

SEQ ID NO: 7026 - DNA, 22 bp, Artificial Sequence
  Description of Artificial Sequence: Synthetic oligonucleotide
atctaaaacttccgctcgtaat

SEQ ID NO: 7027 - DNA, 22 bp, Artificial Sequence
  Description of Artificial Sequence: Synthetic oligonucleotide
ttttgatcgttgagtagtagcg

SEQ ID NO: 7028 - DNA, 22 bp, Artificial Sequence
  Description of Artificial Sequence: Synthetic oligonucleotide
tacaacgtccacgaaaaactaa

SEQ ID NO: 7029 - DNA, 22 bp, Artificial Sequence
  Description of Artificial Sequence: Synthetic oligonucleotide
ttacaacgtccacgaaaaacta

SEQ ID NO: 7030 - DNA, 21 bp, Artificial Sequence
  Description of Artificial Sequence: Synthetic oligonucleotide
ttacggtaggcggtgattagt

SEQ ID NO: 7031 - DNA, 22 bp, Artificial Sequence
  Description of Artificial Sequence: Synthetic oligonucleotide
tacataaaccgaaaatcgaacc

SEQ ID NO: 7032 - DNA, 22 bp, Artificial Sequence
  Description of Artificial Sequence: Synthetic oligonucleotide
ttcgtcggttgtcgtagaaata

SEQ ID NO: 7033 - DNA, 22 bp, Artificial Sequence
  Description of Artificial Sequence: Synthetic oligonucleotide
taacccgataaaacgaacaaaa

SEQ ID NO: 7034 - DNA, 21 bp, Artificial Sequence
  Description of Artificial Sequence: Synthetic oligonucleotide
ataaaatacgcgaccgaaatc

SEQ ID NO: 7035 - DNA, 22 bp, Artificial Sequence
  Description of Artificial Sequence: Synthetic oligonucleotide
tcgacaaaataaaatacgcgac

SEQ ID NO: 7036 - DNA, 23 bp, Artificial Sequence
  Description of Artificial Sequence: Synthetic oligonucleotide
tttgtcggtttatttgtagttcg

SEQ ID NO: 7037 - DNA, 21 bp, Artificial Sequence
  Description of Artificial Sequence: Synthetic oligonucleotide
tttagttatgttagcggcgac

SEQ ID NO: 7038 - DNA, 21 bp, Artificial Sequence
  Description of Artificial Sequence: Synthetic oligonucleotide
aataaaatacgcgaccgaaat

SEQ ID NO: 7039 - DNA, 21 bp, Artificial Sequence
  Description of Artificial Sequence: Synthetic oligonucleotide
acgaatcgctcgctactactc

SEQ ID NO: 7040 - DNA, 22 bp, Artificial Sequence
  Description of Artificial Sequence: Synthetic oligonucleotide
ttatttgtagttcggacgtttg

SEQ ID NO: 7041 - DNA, 23 bp, Artificial Sequence
  Description of Artificial Sequence: Synthetic oligonucleotide
tctaaaacttccgctcgtaattc

SEQ ID NO: 7042 - DNA, 22 bp, Artificial Sequence
  Description of Artificial Sequence: Synthetic oligonucleotide
cttccgctcgtaattcctctta

SEQ ID NO: 7043 - DNA, 20 bp, Artificial Sequence
  Description of Artificial Sequence: Synthetic oligonucleotide
aacttccgctcgtaattcct

SEQ ID NO: 7044 - DNA, 21 bp, Artificial Sequence
  Description of Artificial Sequence: Synthetic oligonucleotide
ttccgctcgtaattcctctta

SEQ ID NO: 7045 - DNA, 22 bp, Artificial Sequence
  Description of Artificial Sequence: Synthetic oligonucleotide
aaaactaacccgataaaacgaa

SEQ ID NO: 7046 - DNA, 22 bp, Artificial Sequence
  Description of Artificial Sequence: Synthetic oligonucleotide
aaaaactaacccgataaaacga

SEQ ID NO: 7047 - DNA, 22 bp, Artificial Sequence
  Description of Artificial Sequence: Synthetic oligonucleotide
cgaaaaactaacccgataaaac

SEQ ID NO: 7048 - DNA, 22 bp, Artificial Sequence
  Description of Artificial Sequence: Synthetic oligonucleotide
acgaaaaactaacccgataaaa

SEQ ID NO: 7049 - DNA, 22 bp, Artificial Sequence
  Description of Artificial Sequence: Synthetic oligonucleotide
gaaaaactaacccgataaaacg

SEQ ID NO: 7050 - DNA, 22 bp, Artificial Sequence
  Description of Artificial Sequence: Synthetic oligonucleotide
gtagaattttcgtttgttacgc

SEQ ID NO: 7051 - DNA, 21 bp, Artificial Sequence
  Description of Artificial Sequence: Synthetic oligonucleotide
cgacaaaataaaatacgcgac

SEQ ID NO: 7052 - DNA, 23 bp, Artificial Sequence
  Description of Artificial Sequence: Synthetic oligonucleotide
ggtagaattttcgtttgttacgc

SEQ ID NO: 7053 - DNA, 22 bp, Artificial Sequence
  Description of Artificial Sequence: Synthetic oligonucleotide
ctattacaacgtccacgaaaaa

SEQ ID NO: 7054 - DNA, 22 bp, Artificial Sequence
  Description of Artificial Sequence: Synthetic oligonucleotide
gtcctattacaacgtccacgaa

SEQ ID NO: 7055 - DNA, 22 bp, Artificial Sequence
  Description of Artificial Sequence: Synthetic oligonucleotide
gtaataggacggaggtttacgg

SEQ ID NO: 7056 - DNA, 21 bp, Artificial Sequence
  Description of Artificial Sequence: Synthetic oligonucleotide
tttgtagttcggacgtttgtc

SEQ ID NO: 7057 - DNA, 22 bp, Artificial Sequence
  Description of Artificial Sequence: Synthetic oligonucleotide
cctattacaacgtccacgaaaa

SEQ ID NO: 7058 - DNA, 22 bp, Artificial Sequence
  Description of Artificial Sequence: Synthetic oligonucleotide
acgtttgtcggttagaggtagc

SEQ ID NO: 7059 - DNA, 22 bp, Artificial Sequence
  Description of Artificial Sequence: Synthetic oligonucleotide
acgttgtaataggacggaggtt

SEQ ID NO: 7060 - DNA, 23 bp, Artificial Sequence
  Description of Artificial Sequence: Synthetic oligonucleotide
tatttgtagttcggacgtttgtc

SEQ ID NO: 7061 - DNA, 20 bp, Artificial Sequence
  Description of Artificial Sequence: Synthetic oligonucleotide
cgaatcgctcgctactactc

SEQ ID NO: 7062 - DNA, 21 bp, Artificial Sequence
  Description of Artificial Sequence: Synthetic oligonucleotide
cgaaaatctaaaacttccgct

SEQ ID NO: 7063 - DNA, 21 bp, Artificial Sequence
  Description of Artificial Sequence: Synthetic oligonucleotide
aaaataaaatacgcgaccgaa

SEQ ID NO: 7064 - DNA, 23 bp, Artificial Sequence
  Description of Artificial Sequence: Synthetic oligonucleotide
tttatttgtagttcggacgtttg

SEQ ID NO: 7065 - DNA, 21 bp, Artificial Sequence
  Description of Artificial Sequence: Synthetic oligonucleotide
aaacttccgctcgtaattcct

SEQ ID NO: 7066 - DNA, 21 bp, Artificial Sequence
  Description of Artificial Sequence: Synthetic oligonucleotide
tcctattacaacgtccacgaa

SEQ ID NO: 7067 - DNA, 22 bp, Artificial Sequence
  Description of Artificial Sequence: Synthetic oligonucleotide
agtttaagaggaattacgagcg

SEQ ID NO: 7068 - DNA, 22 bp, Artificial Sequence
  Description of Artificial Sequence: Synthetic oligonucleotide
ataactaaaacgacccaaaccg

SEQ ID NO: 7069 - DNA, 42 bp, Artificial Sequence
  Description of Artificial Sequence: Synthetic oligonucleotide
ttcgtcgggattagttttgcgttatagcgtatttttacgcgg

SEQ ID NO: 7070 - DNA, 21 bp, Artificial Sequence
  Description of Artificial Sequence: Synthetic oligonucleotide
aacgtccacgaaaaactaacc

SEQ ID NO: 7071 - DNA, 22 bp, Artificial Sequence
  Description of Artificial Sequence: Synthetic oligonucleotide
tattacaacgtccacgaaaaac

SEQ ID NO: 7072 - DNA, 21 bp, Artificial Sequence
  Description of Artificial Sequence: Synthetic oligonucleotide
cggtagagaaagcgtaagatg

SEQ ID NO: 7073 - DNA, 22 bp, Artificial Sequence
  Description of Artificial Sequence: Synthetic oligonucleotide
acaacgtccacgaaaaactaac

SEQ ID NO: 7074 - DNA, 21 bp, Artificial Sequence
  Description of Artificial Sequence: Synthetic oligonucleotide
ttttatcggtttgcgtttatc

SEQ ID NO: 7075 - DNA, 22 bp, Artificial Sequence
  Description of Artificial Sequence: Synthetic oligonucleotide
gaatcgctcgctactactcaac

SEQ ID NO: 7076 - DNA, 23 bp, Artificial Sequence
  Description of Artificial Sequence: Synthetic oligonucleotide
gttttagttatgttagcggcgac

SEQ ID NO: 7077 - DNA, 22 bp, Artificial Sequence
  Description of Artificial Sequence: Synthetic oligonucleotide
ggattcgcgtttagtaaggttc

SEQ ID NO: 7078 - DNA, 21 bp, Artificial Sequence
  Description of Artificial Sequence: Synthetic oligonucleotide
atcttacgctttctctaccgc

SEQ ID NO: 7079 - DNA, 22 bp, Artificial Sequence
  Description of Artificial Sequence: Synthetic oligonucleotide
ttcgggcgcgggttacggtcgg

SEQ ID NO: 7080 - DNA, 23 bp, Artificial Sequence
  Description of Artificial Sequence: Synthetic oligonucleotide
tatcgacaaaataaaatacgcga

SEQ ID NO: 7081 - DNA, 22 bp, Artificial Sequence
  Description of Artificial Sequence: Synthetic oligonucleotide
atatacgactccacgaacgaat

SEQ ID NO: 7082 - DNA, 20 bp, Artificial Sequence
  Description of Artificial Sequence: Synthetic oligonucleotide
acgccaacgaaaactaacac

SEQ ID NO: 7083 - DNA, 21 bp, Artificial Sequence
  Description of Artificial Sequence: Synthetic oligonucleotide
aacgccaacgaaaactaacac

SEQ ID NO: 7084 - DNA, 21 bp, Artificial Sequence
  Description of Artificial Sequence: Synthetic oligonucleotide
taataggacggaggtttacgg

SEQ ID NO: 7085 - DNA, 23 bp, Artificial Sequence
  Description of Artificial Sequence: Synthetic oligonucleotide
tttgatcgttgagtagtagcgag

SEQ ID NO: 7086 - DNA, 22 bp, Artificial Sequence
  Description of Artificial Sequence: Synthetic oligonucleotide
attcgcgtttagtaaggttcgt

SEQ ID NO: 7087 - DNA, 21 bp, Artificial Sequence
  Description of Artificial Sequence: Synthetic oligonucleotide
cgttgtaataggacggaggtt

SEQ ID NO: 7088 - DNA, 21 bp, Artificial Sequence
  Description of Artificial Sequence: Synthetic oligonucleotide
cgtttgtcggttagaggtagc

SEQ ID NO: 7089 - DNA, 21 bp, Artificial Sequence
  Description of Artificial Sequence: Synthetic oligonucleotide
ttcgtggacgttgtaatagga

SEQ ID NO: 7090 - DNA, 23 bp, Artificial Sequence
  Description of Artificial Sequence: Synthetic oligonucleotide
ttatttgtagttcggacgtttgt

SEQ ID NO: 7091 - DNA, 22 bp, Artificial Sequence
  Description of Artificial Sequence: Synthetic oligonucleotide
cgcgtttagtaaggttcgttat

SEQ ID NO: 7092 - DNA, 21 bp, Artificial Sequence
  Description of Artificial Sequence: Synthetic oligonucleotide
catcttacgctttctctaccg

SEQ ID NO: 7093 - DNA, 20 bp, Artificial Sequence
  Description of Artificial Sequence: Synthetic oligonucleotide
actacgacctaaacgcaacg

SEQ ID NO: 7094 - DNA, 21 bp, Artificial Sequence
  Description of Artificial Sequence: Synthetic oligonucleotide
acttccgctcgtaattcctct

SEQ ID NO: 7095 - DNA, 20 bp, Artificial Sequence
  Description of Artificial Sequence: Synthetic oligonucleotide
tccgctcgtaattcctctta

SEQ ID NO: 7096 - DNA, 21 bp, Artificial Sequence
  Description of Artificial Sequence: Synthetic oligonucleotide
gtttgtcggttagaggtagcg

SEQ ID NO: 7097 - DNA, 21 bp, Artificial Sequence
  Description of Artificial Sequence: Synthetic oligonucleotide
gtttttcgacgtgacgagagt

SEQ ID NO: 7098 - DNA, 22 bp, Artificial Sequence
  Description of Artificial Sequence: Synthetic oligonucleotide
cgtaaacctccgtcctattaca

SEQ ID NO: 7099 - DNA, 33 bp, Artificial Sequence
  Description of Artificial Sequence: Synthetic oligonucleotide
gttcgttttatcgggttagtttttcgtggacgt

SEQ ID NO: 7100 - DNA, 23 bp, Artificial Sequence
  Description of Artificial Sequence: Synthetic oligonucleotide
tttttgatcgttgagtagtagcg

SEQ ID NO: 7101 - DNA, 22 bp, Artificial Sequence
  Description of Artificial Sequence: Synthetic oligonucleotide
taacaaacgccaacgaaaacta

SEQ ID NO: 7102 - DNA, 21 bp, Artificial Sequence
  Description of Artificial Sequence: Synthetic oligonucleotide
tttaagaggaattacgagcgg

SEQ ID NO: 7103 - DNA, 23 bp, Artificial Sequence
  Description of Artificial Sequence: Synthetic oligonucleotide
cgcgctaaatataactaaaacga

SEQ ID NO: 7104 - DNA, 27 bp, Artificial Sequence
  Description of Artificial Sequence: Synthetic oligonucleotide
agcgtatttttacgcgggaagtcgcgg

SEQ ID NO: 7105 - DNA, 22 bp, Artificial Sequence
  Description of Artificial Sequence: Synthetic oligonucleotide
aaactaacccgataaaacgaac

SEQ ID NO: 7106 - DNA, 21 bp, Artificial Sequence
  Description of Artificial Sequence: Synthetic oligonucleotide
acataaaccgaaaatcgaacc

SEQ ID NO: 7107 - DNA, 21 bp, Artificial Sequence
  Description of Artificial Sequence: Synthetic oligonucleotide
acaaaataaaatacgcgaccg

SEQ ID NO: 7108 - DNA, 20 bp, Artificial Sequence
  Description of Artificial Sequence: Synthetic oligonucleotide
atacaccgataacaaacgcc

SEQ ID NO: 7109 - DNA, 20 bp, Artificial Sequence
  Description of Artificial Sequence: Synthetic oligonucleotide
ttttcgacgtgacgagagtt

SEQ ID NO: 7110 - DNA, 20 bp, Artificial Sequence
  Description of Artificial Sequence: Synthetic oligonucleotide
tttttcgacgtgacgagagt

SEQ ID NO: 7111 - DNA, 21 bp, Artificial Sequence
  Description of Artificial Sequence: Synthetic oligonucleotide
acccgataaaacgaacaaaaa

SEQ ID NO: 7112 - DNA, 21 bp, Artificial Sequence
  Description of Artificial Sequence: Synthetic oligonucleotide
aacccgataaaacgaacaaaa

SEQ ID NO: 7113 - DNA, 22 bp, Artificial Sequence
  Description of Artificial Sequence: Synthetic oligonucleotide
gacgttgtaataggacggaggt

SEQ ID NO: 7114 - DNA, 20 bp, Artificial Sequence
  Description of Artificial Sequence: Synthetic oligonucleotide
tttgtcggttagaggtagcg

SEQ ID NO: 7115 - DNA, 22 bp, Artificial Sequence
  Description of Artificial Sequence: Synthetic oligonucleotide
agatacgagagcgcgttagata

SEQ ID NO: 7116 - DNA, 22 bp, Artificial Sequence
  Description of Artificial Sequence: Synthetic oligonucleotide
acgaataactacaaacccgtaa

SEQ ID NO: 7117 - DNA, 39 bp, Artificial Sequence
  Description of Artificial Sequence: Synthetic oligonucleotide
tttgttcgacgtattttattttacggaatatcgttaggt

SEQ ID NO: 7118 - DNA, 22 bp, Artificial Sequence
  Description of Artificial Sequence: Synthetic oligonucleotide
tagatacgagagcgcgttagat

SEQ ID NO: 7119 - DNA, 21 bp, Artificial Sequence
  Description of Artificial Sequence: Synthetic oligonucleotide
taaaacttccgctcgtaattc

SEQ ID NO: 7120 - DNA, 38 bp, Artificial Sequence
  Description of Artificial Sequence: Synthetic oligonucleotide
tgtatatagtttggtaggcgagtttaaattcggaaaga

SEQ ID NO: 7121 - DNA, 21 bp, Artificial Sequence
  Description of Artificial Sequence: Synthetic oligonucleotide
tttttatcggtttgcgtttat

SEQ ID NO: 7122 - DNA, 21 bp, Artificial Sequence
  Description of Artificial Sequence: Synthetic oligonucleotide
ctccgtcctattacaacgtcc

SEQ ID NO: 7123 - DNA, 20 bp, Artificial Sequence
  Description of Artificial Sequence: Synthetic oligonucleotide
tacggtaggcggtgattagt

SEQ ID NO: 7124 - DNA, 20 bp, Artificial Sequence
  Description of Artificial Sequence: Synthetic oligonucleotide
gcggtagagaaagcgtaaga

SEQ ID NO: 7125 - DNA, 22 bp, Artificial Sequence
  Description of Artificial Sequence: Synthetic oligonucleotide
aacgcaactacgccttaatact

SEQ ID NO: 7126 - DNA, 20 bp, Artificial Sequence
  Description of Artificial Sequence: Synthetic oligonucleotide
taaaatacgcgaccgaaatc

SEQ ID NO: 7127 - DNA, 21 bp, Artificial Sequence
  Description of Artificial Sequence: Synthetic oligonucleotide
aactacgacctaaacgcaacg

SEQ ID NO: 7128 - DNA, 20 bp, Artificial Sequence
  Description of Artificial Sequence: Synthetic oligonucleotide
caaaataaaatacgcgaccg

SEQ ID NO: 7129 - DNA, 21 bp, Artificial Sequence
  Description of Artificial Sequence: Synthetic oligonucleotide
aaacgccaacgaaaactaaca

SEQ ID NO: 7130 - DNA, 21 bp, Artificial Sequence
  Description of Artificial Sequence: Synthetic oligonucleotide
acaaacgccaacgaaaactaa

SEQ ID NO: 7131 - DNA, 21 bp, Artificial Sequence
  Description of Artificial Sequence: Synthetic oligonucleotide
ggacgttgtaataggacggag

SEQ ID NO: 7132 - DNA, 20 bp, Artificial Sequence
  Description of Artificial Sequence: Synthetic oligonucleotide
tcttacgctttctctaccgc

SEQ ID NO: 7133 - DNA, 22 bp, Artificial Sequence
  Description of Artificial Sequence: Synthetic oligonucleotide
taagaggaattacgagcggaag

SEQ ID NO: 7134 - DNA, 22 bp, Artificial Sequence
  Description of Artificial Sequence: Synthetic oligonucleotide
ctaccgtaaacctccgtcctat

SEQ ID NO: 7135 - DNA, 21 bp, Artificial Sequence
  Description of Artificial Sequence: Synthetic oligonucleotide
cgtttatcgttttgaatcgtc

SEQ ID NO: 7136 - DNA, 21 bp, Artificial Sequence
  Description of Artificial Sequence: Synthetic oligonucleotide
tttatcgttttgaatcgtcgt

SEQ ID NO: 7137 - DNA, 24 bp, Artificial Sequence
  Description of Artificial Sequence: Synthetic oligonucleotide
cgacgacctaactaaaatatcgac

SEQ ID NO: 7138 - DNA, 21 bp, Artificial Sequence
  Description of Artificial Sequence: Synthetic oligonucleotide
tatcgttttgaatcgtcgttg

SEQ ID NO: 7139 - DNA, 23 bp, Artificial Sequence
  Description of Artificial Sequence: Synthetic oligonucleotide
attcgtcggttgtcgtagaaata

SEQ ID NO: 7140 - DNA, 20 bp, Artificial Sequence
  Description of Artificial Sequence: Synthetic oligonucleotide
aagcgtaagatgggacgagt

SEQ ID NO: 7141 - DNA, 21 bp, Artificial Sequence
  Description of Artificial Sequence: Synthetic oligonucleotide
taactaaaacgacccaaaccg

SEQ ID NO: 7142 - DNA, 20 bp, Artificial Sequence
  Description of Artificial Sequence: Synthetic oligonucleotide
caaacgccaacgaaaactaa

SEQ ID NO: 7143 - DNA, 22 bp, Artificial Sequence
  Description of Artificial Sequence: Synthetic oligonucleotide
gcgtaacaaacgaaaattctac

SEQ ID NO: 7144 - DNA, 21 bp, Artificial Sequence
  Description of Artificial Sequence: Synthetic oligonucleotide
ttaagaggaattacgagcgga

SEQ ID NO: 7145 - DNA, 34 bp, Artificial Sequence
  Description of Artificial Sequence: Synthetic oligonucleotide
gttttatcgggttagtttttcgtggacgttgtaa

SEQ ID NO: 7146 - DNA, 24 bp, Artificial Sequence
  Description of Artificial Sequence: Synthetic oligonucleotide
gtggtagaattttcgtttgttacg

SEQ ID NO: 7147 - DNA, 22 bp, Artificial Sequence
  Description of Artificial Sequence: Synthetic oligonucleotide
cgaaaatctaaaacttccgctc

SEQ ID NO: 7148 - DNA, 21 bp, Artificial Sequence
  Description of Artificial Sequence: Synthetic oligonucleotide
ttcgcgtttagtaaggttcgt

SEQ ID NO: 7149 - DNA, 21 bp, Artificial Sequence
  Description of Artificial Sequence: Synthetic oligonucleotide
gtcggtttatttgtagttcgg

SEQ ID NO: 7150 - DNA, 22 bp, Artificial Sequence
  Description of Artificial Sequence: Synthetic oligonucleotide
cgaataactacaaacccgtaat

SEQ ID NO: 7151 - DNA, 41 bp, Artificial Sequence
  Description of Artificial Sequence: Synthetic oligonucleotide
gtttttgttcgacgtattttattttacggaatatcgttagg

SEQ ID NO: 7152 - DNA, 20 bp, Artificial Sequence
  Description of Artificial Sequence: Synthetic oligonucleotide
actcgtcccatcttacgctt

SEQ ID NO: 7153 - DNA, 30 bp, Artificial Sequence
  Description of Artificial Sequence: Synthetic oligonucleotide
ttcggcgggtagtttttcgattttgggcgg

SEQ ID NO: 7154 - DNA, 20 bp, Artificial Sequence
  Description of Artificial Sequence: Synthetic oligonucleotide
ataacaaacgccaacgaaaa

SEQ ID NO: 7155 - DNA, 21 bp, Artificial Sequence
  Description of Artificial Sequence: Synthetic oligonucleotide
ccacgaaaaactaacccgata

SEQ ID NO: 7156 - DNA, 21 bp, Artificial Sequence
  Description of Artificial Sequence: Synthetic oligonucleotide
aaaatctaaaacttccgctcg

SEQ ID NO: 7157 - DNA, 21 bp, Artificial Sequence
  Description of Artificial Sequence: Synthetic oligonucleotide
gacaaaataaaatacgcgacc

SEQ ID NO: 7158 - DNA, 22 bp, Artificial Sequence
  Description of Artificial Sequence: Synthetic oligonucleotide
gtttacggtaggcggtgattag

SEQ ID NO: 7159 - DNA, 22 bp, Artificial Sequence
  Description of Artificial Sequence: Synthetic oligonucleotide
tttacggtaggcggtgattagt

SEQ ID NO: 7160 - DNA, 22 bp, Artificial Sequence
  Description of Artificial Sequence: Synthetic oligonucleotide
ttttgttcgttttatcgggtta

SEQ ID NO: 7161 - DNA, 21 bp, Artificial Sequence
  Description of Artificial Sequence: Synthetic oligonucleotide
cgttcactaatcaccgcctac

SEQ ID NO: 7162 - DNA, 29 bp, Artificial Sequence
  Description of Artificial Sequence: Synthetic oligonucleotide
tttcgtggacgttgtaataggacggaggt

SEQ ID NO: 7163 - DNA, 21 bp, Artificial Sequence
  Description of Artificial Sequence: Synthetic oligonucleotide
gttgagtagtagcgagcgatt

SEQ ID NO: 7164 - DNA, 39 bp, Artificial Sequence
  Description of Artificial Sequence: Synthetic oligonucleotide
ttcgtggagtcgtatatacgttttttattagaggtacgt

SEQ ID NO: 7165 - DNA, 23 bp, Artificial Sequence
  Description of Artificial Sequence: Synthetic oligonucleotide
tagtttaagaggaattacgagcg

SEQ ID NO: 7166 - DNA, 22 bp, Artificial Sequence
  Description of Artificial Sequence: Synthetic oligonucleotide
tttagatacgagagcgcgttag

SEQ ID NO: 7167 - DNA, 23 bp, Artificial Sequence
  Description of Artificial Sequence: Synthetic oligonucleotide
aacgtctatccgaaaaacaatta

SEQ ID NO: 7168 - DNA, 21 bp, Artificial Sequence
  Description of Artificial Sequence: Synthetic oligonucleotide
tattcgtcggttgtcgtagaa

SEQ ID NO: 7169 - DNA, 31 bp, Artificial Sequence
  Description of Artificial Sequence: Synthetic oligonucleotide
agtttaggattatgcgttagcgttcgcgatt

SEQ ID NO: 7170 - DNA, 23 bp, Artificial Sequence
  Description of Artificial Sequence: Synthetic oligonucleotide
aatacgaataactacaaacccgt

SEQ ID NO: 7171 - DNA, 24 bp, Artificial Sequence
  Description of Artificial Sequence: Synthetic oligonucleotide
gcgctaaatataactaaaacgacc

SEQ ID NO: 7172 - DNA, 21 bp, Artificial Sequence
  Description of Artificial Sequence: Synthetic oligonucleotide
ggtttatttgtagttcggacg

SEQ ID NO: 7173 - DNA, 20 bp, Artificial Sequence
  Description of Artificial Sequence: Synthetic oligonucleotide
acaaacgccaacgaaaacta

SEQ ID NO: 7174 - DNA, 21 bp, Artificial Sequence
  Description of Artificial Sequence: Synthetic oligonucleotide
aaactacgacctaaacgcaac

SEQ ID NO: 7175 - DNA, 22 bp, Artificial Sequence
  Description of Artificial Sequence: Synthetic oligonucleotide
ttatcgttttgaatcgtcgttg

SEQ ID NO: 7176 - DNA, 22 bp, Artificial Sequence
  Description of Artificial Sequence: Synthetic oligonucleotide
taccgtaaacctccgtcctatt

SEQ ID NO: 7177 - DNA, 22 bp, Artificial Sequence
  Description of Artificial Sequence: Synthetic oligonucleotide
ccgtaaacctccgtcctattac

SEQ ID NO: 7178 - DNA, 19 bp, Artificial Sequence
  Description of Artificial Sequence: Synthetic oligonucleotide
aagcgtaagatgggacgag

SEQ ID NO: 7179 - DNA, 22 bp, Artificial Sequence
  Description of Artificial Sequence: Synthetic oligonucleotide
ataacaaacgccaacgaaaact

SEQ ID NO: 7180 - DNA, 19 bp, Artificial Sequence
  Description of Artificial Sequence: Synthetic oligonucleotide
ggcggtagagaaagcgtaa

SEQ ID NO: 7181 - DNA, 21 bp, Artificial Sequence
  Description of Artificial Sequence: Synthetic oligonucleotide
gtttacggtaggcggtgatta

SEQ ID NO: 7182 - DNA, 20 bp, Artificial Sequence
  Description of Artificial Sequence: Synthetic oligonucleotide
accgactcgtcccatcttac

SEQ ID NO: 7183 - DNA, 20 bp, Artificial Sequence
  Description of Artificial Sequence: Synthetic oligonucleotide
aataggacggaggtttacgg

SEQ ID NO: 7184 - DNA, 23 bp, Artificial Sequence
  Description of Artificial Sequence: Synthetic oligonucleotide
tataactaaaacgacccaaaccg

SEQ ID NO: 7185 - DNA, 21 bp, Artificial Sequence
  Description of Artificial Sequence: Synthetic oligonucleotide
cgttgagtagtagcgagcgat

SEQ ID NO: 7186 - DNA, 21 bp, Artificial Sequence
  Description of Artificial Sequence: Synthetic oligonucleotide
atcgttgagtagtagcgagcg

SEQ ID NO: 7187 - DNA, 21 bp, Artificial Sequence
  Description of Artificial Sequence: Synthetic oligonucleotide
aggaattacgagcggaagttt

SEQ ID NO: 7188 - DNA, 24 bp, Artificial Sequence
  Description of Artificial Sequence: Synthetic oligonucleotide
cgctaaatataactaaaacgaccc

SEQ ID NO: 7189 - DNA, 23 bp, Artificial Sequence
  Description of Artificial Sequence: Synthetic oligonucleotide
aaaaacgtctatccgaaaaacaa

SEQ ID NO: 7190 - DNA, 19 bp, Artificial Sequence
  Description of Artificial Sequence: Synthetic oligonucleotide
ccgactcgtcccatcttac

SEQ ID NO: 7191 - DNA, 20 bp, Artificial Sequence
  Description of Artificial Sequence: Synthetic oligonucleotide
aaaatcgaaaaactacccgc

SEQ ID NO: 7192 - DNA, 23 bp, Artificial Sequence
  Description of Artificial Sequence: Synthetic oligonucleotide
ggtttatttgtagttcggacgtt

SEQ ID NO: 7193 - DNA, 19 bp, Artificial Sequence
  Description of Artificial Sequence: Synthetic oligonucleotide
ctcgtcccatcttacgctt

SEQ ID NO: 7194 - DNA, 20 bp, Artificial Sequence
  Description of Artificial Sequence: Synthetic oligonucleotide
ggaattacgagcggaagttt

SEQ ID NO: 7195 - DNA, 23 bp, Artificial Sequence
  Description of Artificial Sequence: Synthetic oligonucleotide
cgctcgtaattcctcttaaacta

SEQ ID NO: 7196 - DNA, 19 bp, Artificial Sequence
  Description of Artificial Sequence: Synthetic oligonucleotide
ttacgctttctctaccgcc

SEQ ID NO: 7197 - DNA, 20 bp, Artificial Sequence
  Description of Artificial Sequence: Synthetic oligonucleotide
cttacgctttctctaccgcc

SEQ ID NO: 7198 - DNA, 20 bp, Artificial Sequence
  Description of Artificial Sequence: Synthetic oligonucleotide
cccgataaaacgaacaaaaa

SEQ ID NO: 7199 - DNA, 21 bp, Artificial Sequence
  Description of Artificial Sequence: Synthetic oligonucleotide
gtcggttgcgtatcgaattta

SEQ ID NO: 7200 - DNA, 22 bp, Artificial Sequence
  Description of Artificial Sequence: Synthetic oligonucleotide
tcgccgctaacataactaaaac

SEQ ID NO: 7201 - DNA, 30 bp, Artificial Sequence
  Description of Artificial Sequence: Synthetic oligonucleotide
ggcgtcggttaagggcgtaggcgttcgcgt

SEQ ID NO: 7202 - DNA, 20 bp, Artificial Sequence
  Description of Artificial Sequence: Synthetic oligonucleotide
tatcggtttgcgtttatcgt

SEQ ID NO: 7203 - DNA, 21 bp, Artificial Sequence
  Description of Artificial Sequence: Synthetic oligonucleotide
gacgtttgtcggttagaggta

SEQ ID NO: 7204 - DNA, 19 bp, Artificial Sequence
  Description of Artificial Sequence: Synthetic oligonucleotide
aaagcgtaagatgggacga

SEQ ID NO: 7205 - DNA, 19 bp, Artificial Sequence
  Description of Artificial Sequence: Synthetic oligonucleotide
gaaagcgtaagatgggacg

SEQ ID NO: 7206 - DNA, 21 bp, Artificial Sequence
  Description of Artificial Sequence: Synthetic oligonucleotide
ccgtcctattacaacgtccac

SEQ ID NO: 7207 - DNA, 20 bp, Artificial Sequence
  Description of Artificial Sequence: Synthetic oligonucleotide
agaaagcgtaagatgggacg

SEQ ID NO: 7208 - DNA, 20 bp, Artificial Sequence
  Description of Artificial Sequence: Synthetic oligonucleotide
cgtttgttatcggtgtatgg

SEQ ID NO: 7209 - DNA, 31 bp, Artificial Sequence
  Description of Artificial Sequence: Synthetic oligonucleotide
ttcgtttgttacgcgggaggttcgggttcga

SEQ ID NO: 7210 - DNA, 23 bp, Artificial Sequence
  Description of Artificial Sequence: Synthetic oligonucleotide
tacgaataactacaaacccgtaa

SEQ ID NO: 7211 - DNA, 20 bp, Artificial Sequence
  Description of Artificial Sequence: Synthetic oligonucleotide
catacaccgataacaaacgc

SEQ ID NO: 7212 - DNA, 24 bp, Artificial Sequence
  Description of Artificial Sequence: Synthetic oligonucleotide
cgctcgtaattcctcttaaactat

SEQ ID NO: 7213 - DNA, 22 bp, Artificial Sequence
  Description of Artificial Sequence: Synthetic oligonucleotide
gtttaagaggaattacgagcgg

SEQ ID NO: 7214 - DNA, 20 bp, Artificial Sequence
  Description of Artificial Sequence: Synthetic oligonucleotide
tcgcgtttagtaaggttcgt

SEQ ID NO: 7215 - DNA, 19 bp, Artificial Sequence
  Description of Artificial Sequence: Synthetic oligonucleotide
gactcgtcccatcttacgc

SEQ ID NO: 7216 - DNA, 24 bp, Artificial Sequence
  Description of Artificial Sequence: Synthetic oligonucleotide
gtttgtcggtttatttgtagttcg

SEQ ID NO: 7217 - DNA, 20 bp, Artificial Sequence
  Description of Artificial Sequence: Synthetic oligonucleotide
gataacaaacgccaacgaaa

SEQ ID NO: 7218 - DNA, 21 bp, Artificial Sequence
  Description of Artificial Sequence: Synthetic oligonucleotide
caaacgccaacgaaaactaac

SEQ ID NO: 7219 - DNA, 21 bp, Artificial Sequence
  Description of Artificial Sequence: Synthetic oligonucleotide
aacaaacgccaacgaaaacta

SEQ ID NO: 7220 - DNA, 19 bp, Artificial Sequence
  Description of Artificial Sequence: Synthetic oligonucleotide
tcgcgtttcgttttaggtt

SEQ ID NO: 7221 - DNA, 19 bp, Artificial Sequence
  Description of Artificial Sequence: Synthetic oligonucleotide
ttcgcgtttcgttttaggt

SEQ ID NO: 7222 - DNA, 22 bp, Artificial Sequence
  Description of Artificial Sequence: Synthetic oligonucleotide
acgtctatccgaaaaacaatta

SEQ ID NO: 7223 - DNA, 20 bp, Artificial Sequence
  Description of Artificial Sequence: Synthetic oligonucleotide
tccgtcctattacaacgtcc

SEQ ID NO: 7224 - DNA, 19 bp, Artificial Sequence
  Description of Artificial Sequence: Synthetic oligonucleotide
cgtcccatcttacgctttc

SEQ ID NO: 7225 - DNA, 19 bp, Artificial Sequence
  Description of Artificial Sequence: Synthetic oligonucleotide
tcgtcccatcttacgcttt

SEQ ID NO: 7226 - DNA, 24 bp, Artificial Sequence
  Description of Artificial Sequence: Synthetic oligonucleotide
atatcgacaaaataaaatacgcga

SEQ ID NO: 7227 - DNA, 20 bp, Artificial Sequence
  Description of Artificial Sequence: Synthetic oligonucleotide
agaggaattacgagcggaag

SEQ ID NO: 7228 - DNA, 22 bp, Artificial Sequence
  Description of Artificial Sequence: Synthetic oligonucleotide
ttagatacgagagcgcgttaga

SEQ ID NO: 7229 - DNA, 20 bp, Artificial Sequence
  Description of Artificial Sequence: Synthetic oligonucleotide
ccatacaccgataacaaacg

SEQ ID NO: 7230 - DNA, 23 bp, Artificial Sequence
  Description of Artificial Sequence: Synthetic oligonucleotide
ttgtaataggacggaggtttacg

SEQ ID NO: 7231 - DNA, 21 bp, Artificial Sequence
  Description of Artificial Sequence: Synthetic oligonucleotide
cctccgtcctattacaacgtc

SEQ ID NO: 7232 - DNA, 20 bp, Artificial Sequence
  Description of Artificial Sequence: Synthetic oligonucleotide
ataaaccgaaaatcgaaccc

SEQ ID NO: 7233 - DNA, 19 bp, Artificial Sequence
  Description of Artificial Sequence: Synthetic oligonucleotide
attttcgtttgttacgcgg

SEQ ID NO: 7234 - DNA, 33 bp, Artificial Sequence
  Description of Artificial Sequence: Synthetic oligonucleotide
gttcgggttcgattttcggtttatgtagtacgt

SEQ ID NO: 7235 - DNA, 20 bp, Artificial Sequence
  Description of Artificial Sequence: Synthetic oligonucleotide
cgtcggttgtcgtagaaata

SEQ ID NO: 7236 - DNA, 21 bp, Artificial Sequence
  Description of Artificial Sequence: Synthetic oligonucleotide
ctaccgtaaacctccgtccta

SEQ ID NO: 7237 - DNA, 20 bp, Artificial Sequence
  Description of Artificial Sequence: Synthetic oligonucleotide
cgaatttagataggcgtcgg

SEQ ID NO: 7238 - DNA, 36 bp, Artificial Sequence
  Description of Artificial Sequence: Synthetic oligonucleotide
ggcgcgtcgttaggatggtcgagcggtttaaggcgt

SEQ ID NO: 7239 - DNA, 20 bp, Artificial Sequence
  Description of Artificial Sequence: Synthetic oligonucleotide
taagatgggacgagtcggtt

SEQ ID NO: 7240 - DNA, 21 bp, Artificial Sequence
  Description of Artificial Sequence: Synthetic oligonucleotide
caacgtccacgaaaaactaac

SEQ ID NO: 7241 - DNA, 21 bp, Artificial Sequence
  Description of Artificial Sequence: Synthetic oligonucleotide
tatacgactccacgaacgaat

SEQ ID NO: 7242 - DNA, 21 bp, Artificial Sequence
  Description of Artificial Sequence: Synthetic oligonucleotide
aaacgtctatccgaaaaacaa

SEQ ID NO: 7243 - DNA, 22 bp, Artificial Sequence
  Description of Artificial Sequence: Synthetic oligonucleotide
gtttatttgtagttcggacgtt

SEQ ID NO: 7244 - DNA, 23 bp, Artificial Sequence
  Description of Artificial Sequence: Synthetic oligonucleotide
acgcgctaaatataactaaaacg

SEQ ID NO: 7245 - DNA, 21 bp, Artificial Sequence
  Description of Artificial Sequence: Synthetic oligonucleotide
ttatcggtttgcgtttatcgt

SEQ ID NO: 7246 - DNA, 22 bp, Artificial Sequence
  Description of Artificial Sequence: Synthetic oligonucleotide
tcgggttttagttatgttagcg

SEQ ID NO: 7247 - DNA, 19 bp, Artificial Sequence
  Description of Artificial Sequence: Synthetic oligonucleotide
acctaaacgcaacgcctta

SEQ ID NO: 7248 - DNA, 21 bp, Artificial Sequence
  Description of Artificial Sequence: Synthetic oligonucleotide
tgatcgttgagtagtagcgag

SEQ ID NO: 7249 - DNA, 22 bp, Artificial Sequence
  Description of Artificial Sequence: Synthetic oligonucleotide
agttttcgttggcgtttgttat

SEQ ID NO: 7250 - DNA, 22 bp, Artificial Sequence
  Description of Artificial Sequence: Synthetic oligonucleotide
cgcaactacgccttaatactac

SEQ ID NO: 7251 - DNA, 22 bp, Artificial Sequence
  Description of Artificial Sequence: Synthetic oligonucleotide
attcgtcggttgtcgtagaaat

SEQ ID NO: 7252 - DNA, 32 bp, Artificial Sequence
  Description of Artificial Sequence: Synthetic oligonucleotide
gtttaggattatgcgttagcgttcgcgatttt

SEQ ID NO: 7253 - DNA, 20 bp, Artificial Sequence
  Description of Artificial Sequence: Synthetic oligonucleotide
caaaatcgaaaaactacccg

SEQ ID NO: 7254 - DNA, 20 bp, Artificial Sequence
  Description of Artificial Sequence: Synthetic oligonucleotide
aaaacttccgctcgtaattc

SEQ ID NO: 7255 - DNA, 24 bp, Artificial Sequence
  Description of Artificial Sequence: Synthetic oligonucleotide
atagtttaagaggaattacgagcg

SEQ ID NO: 7256 - DNA, 19 bp, Artificial Sequence
  Description of Artificial Sequence: Synthetic oligonucleotide
agcgtaagatgggacgagt

SEQ ID NO: 7257 - DNA, 20 bp, Artificial Sequence
  Description of Artificial Sequence: Synthetic oligonucleotide
aaccgactcgtcccatctta

SEQ ID NO: 7258 - DNA, 23 bp, Artificial Sequence
  Description of Artificial Sequence: Synthetic oligonucleotide
ataacaaacgccaacgaaaacta

SEQ ID NO: 7259 - DNA, 25 bp, Artificial Sequence
  Description of Artificial Sequence: Synthetic oligonucleotide
aatacgaataactacaaacccgtaa

SEQ ID NO: 7260 - DNA, 19 bp, Artificial Sequence
  Description of Artificial Sequence: Synthetic oligonucleotide
acggtaggcggtgattagt

SEQ ID NO: 7261 - DNA, 19 bp, Artificial Sequence
  Description of Artificial Sequence: Synthetic oligonucleotide
aaaaactacccgccgaaat

SEQ ID NO: 7262 - DNA, 19 bp, Artificial Sequence
  Description of Artificial Sequence: Synthetic oligonucleotide
aaaatacgcgaccgaaatc

SEQ ID NO: 7263 - DNA, 24 bp, Artificial Sequence
  Description of Artificial Sequence: Synthetic oligonucleotide
atttttgatcgttgagtagtagcg

SEQ ID NO: 7264 - DNA, 22 bp, Artificial Sequence
  Description of Artificial Sequence: Synthetic oligonucleotide
cgggttttagttatgttagcgg

SEQ ID NO: 7265 - DNA, 20 bp, Artificial Sequence
  Description of Artificial Sequence: Synthetic oligonucleotide
atcgttttgaatcgtcgttg

SEQ ID NO: 7266 - DNA, 21 bp, Artificial Sequence
  Description of Artificial Sequence: Synthetic oligonucleotide
gttttcgttggcgtttgttat

SEQ ID NO: 7267 - DNA, 20 bp, Artificial Sequence
  Description of Artificial Sequence: Synthetic oligonucleotide
cgccaacgaaaactaacaca

SEQ ID NO: 7268 - DNA, 21 bp, Artificial Sequence
  Description of Artificial Sequence: Synthetic oligonucleotide
aagaggaattacgagcggaag

SEQ ID NO: 7269 - DNA, 19 bp, Artificial Sequence
  Description of Artificial Sequence: Synthetic oligonucleotide
cggtttgcgtttatcgttt

SEQ ID NO: 7270 - DNA, 19 bp, Artificial Sequence
  Description of Artificial Sequence: Synthetic oligonucleotide
gataacaaacgccaacgaa

SEQ ID NO: 7271 - DNA, 21 bp, Artificial Sequence
  Description of Artificial Sequence: Synthetic oligonucleotide
aacgcaactacgccttaatac

SEQ ID NO: 7272 - DNA, 21 bp, Artificial Sequence
  Description of Artificial Sequence: Synthetic oligonucleotide
tttagatacgagagcgcgtta

SEQ ID NO: 7273 - DNA, 19 bp, Artificial Sequence
  Description of Artificial Sequence: Synthetic oligonucleotide
aaactacccgccgaaatct

SEQ ID NO: 7274 - DNA, 23 bp, Artificial Sequence
  Description of Artificial Sequence: Synthetic oligonucleotide
acgcaactacgccttaatactac

SEQ ID NO: 7275 - DNA, 20 bp, Artificial Sequence
  Description of Artificial Sequence: Synthetic oligonucleotide
aactaaaacgacccaaaccg

SEQ ID NO: 7276 - DNA, 21 bp, Artificial Sequence
  Description of Artificial Sequence: Synthetic oligonucleotide
gatacgagagcgcgttagata

SEQ ID NO: 7277 - DNA, 22 bp, Artificial Sequence
  Description of Artificial Sequence: Synthetic oligonucleotide
ttttagatacgagagcgcgtta

SEQ ID NO: 7278 - DNA, 24 bp, Artificial Sequence
  Description of Artificial Sequence: Synthetic oligonucleotide
tattcgtcggttgtcgtagaaata

SEQ ID NO: 7279 - DNA, 20 bp, Artificial Sequence
  Description of Artificial Sequence: Synthetic oligonucleotide
gcgtttgttatcggtgtatg

SEQ ID NO: 7280 - DNA, 20 bp, Artificial Sequence
  Description of Artificial Sequence: Synthetic oligonucleotide
aattttcgtttgttacgcgg

SEQ ID NO: 7281 - DNA, 21 bp, Artificial Sequence
  Description of Artificial Sequence: Synthetic oligonucleotide
tatcggtttgcgtttatcgtt

SEQ ID NO: 7282 - DNA, 21 bp, Artificial Sequence
  Description of Artificial Sequence: Synthetic oligonucleotide
gaatcgctcgctactactcaa

SEQ ID NO: 7283 - DNA, 20 bp, Artificial Sequence
  Description of Artificial Sequence: Synthetic oligonucleotide
cggtttgcgtttatcgttta

SEQ ID NO: 7284 - DNA, 22 bp, Artificial Sequence
  Description of Artificial Sequence: Synthetic oligonucleotide
cggtttgggtcgttttagttat

SEQ ID NO: 7285 - DNA, 21 bp, Artificial Sequence
  Description of Artificial Sequence: Synthetic oligonucleotide
caccgactcgcacttaaaatc

SEQ ID NO: 7286 - DNA, 30 bp, Artificial Sequence
  Description of Artificial Sequence: Synthetic oligonucleotide
ggttagttagttgcggttttgtcgaagcgt

SEQ ID NO: 7287 - DNA, 20 bp, Artificial Sequence
  Description of Artificial Sequence: Synthetic oligonucleotide
tcgttgagtagtagcgagcg

SEQ ID NO: 7288 - DNA, 33 bp, Artificial Sequence
  Description of Artificial Sequence: Synthetic oligonucleotide
ggcgttcgcgtcgggttttagttatgttagcgg

SEQ ID NO: 7289 - DNA, 23 bp, Artificial Sequence
  Description of Artificial Sequence: Synthetic oligonucleotide
tcgacgacctaactaaaatatcg

SEQ ID NO: 7290 - DNA, 24 bp, Artificial Sequence
  Description of Artificial Sequence: Synthetic oligonucleotide
aacgcgctaaatataactaaaacg

SEQ ID NO: 7291 - DNA, 21 bp, Artificial Sequence
  Description of Artificial Sequence: Synthetic oligonucleotide
gtgttagttttcgttggcgtt

SEQ ID NO: 7292 - DNA, 22 bp, Artificial Sequence
  Description of Artificial Sequence: Synthetic oligonucleotide
gctcgctactactcaacgatca

SEQ ID NO: 7293 - DNA, 20 bp, Artificial Sequence
  Description of Artificial Sequence: Synthetic oligonucleotide
acttccgctcgtaattcctc

SEQ ID NO: 7294 - DNA, 19 bp, Artificial Sequence
  Description of Artificial Sequence: Synthetic oligonucleotide
tacaccgataacaaacgcc

SEQ ID NO: 7295 - DNA, 20 bp, Artificial Sequence
  Description of Artificial Sequence: Synthetic oligonucleotide
ttttcgttggcgtttgttat

SEQ ID NO: 7296 - DNA, 24 bp, Artificial Sequence
  Description of Artificial Sequence: Synthetic oligonucleotide
atacgaataactacaaacccgtaa

SEQ ID NO: 7297 - DNA, 24 bp, Artificial Sequence
  Description of Artificial Sequence: Synthetic oligonucleotide
taatacgaataactacaaacccgt

SEQ ID NO: 7298 - DNA, 23 bp, Artificial Sequence
  Description of Artificial Sequence: Synthetic oligonucleotide
acgaataactacaaacccgtaat

SEQ ID NO: 7299 - DNA, 20 bp, Artificial Sequence
  Description of Artificial Sequence: Synthetic oligonucleotide
atcgtcgttgcgttgtttag

SEQ ID NO: 7300 - DNA, 33 bp, Artificial Sequence
  Description of Artificial Sequence: Synthetic oligonucleotide
ggcgttttggtttgaatagttcgttcggtttta

SEQ ID NO: 7301 - DNA, 19 bp, Artificial Sequence
  Description of Artificial Sequence: Synthetic oligonucleotide
accgccgttcactaatcac

SEQ ID NO: 7302 - DNA, 21 bp, Artificial Sequence
  Description of Artificial Sequence: Synthetic oligonucleotide
tttttgttcgttttatcgggt

SEQ ID NO: 7303 - DNA, 20 bp, Artificial Sequence
  Description of Artificial Sequence: Synthetic oligonucleotide
cgtatttttacgcgggaagt

SEQ ID NO: 7304 - DNA, 21 bp, Artificial Sequence
  Description of Artificial Sequence: Synthetic oligonucleotide
cgacaaaaccgcaactaacta

SEQ ID NO: 7305 - DNA, 34 bp, Artificial Sequence
  Description of Artificial Sequence: Synthetic oligonucleotide
ggtttgggtcgttttagttatatttagcgcgttt

SEQ ID NO: 7306 - DNA, 22 bp, Artificial Sequence
  Description of Artificial Sequence: Synthetic oligonucleotide
ttagtcggtttcgtttatttgg

SEQ ID NO: 7307 - DNA, 19 bp, Artificial Sequence
  Description of Artificial Sequence: Synthetic oligonucleotide
cgtcgccgctaacataact

SEQ ID NO: 7308 - DNA, 21 bp, Artificial Sequence
  Description of Artificial Sequence: Synthetic oligonucleotide
aaataaaatacgcgaccgaaa

SEQ ID NO: 7309 - DNA, 19 bp, Artificial Sequence
  Description of Artificial Sequence: Synthetic oligonucleotide
cggtaggcggtgattagtg

SEQ ID NO: 7310 - DNA, 18 bp, Artificial Sequence
  Description of Artificial Sequence: Synthetic oligonucleotide
agatgggacgagtcggtt

SEQ ID NO: 7311 - DNA, 21 bp, Artificial Sequence
  Description of Artificial Sequence: Synthetic oligonucleotide
tagttagttgcggttttgtcg

SEQ ID NO: 7312 - DNA, 19 bp, Artificial Sequence
  Description of Artificial Sequence: Synthetic oligonucleotide
tcgctcctacgctctaacc

SEQ ID NO: 7313 - DNA, 30 bp, Artificial Sequence
  Description of Artificial Sequence: Synthetic oligonucleotide
agtttagggggtcggattttaagtgcgagt

SEQ ID NO: 7314 - DNA, 20 bp, Artificial Sequence
  Description of Artificial Sequence: Synthetic oligonucleotide
tgttagttttcgttggcgtt

SEQ ID NO: 7315 - DNA, 23 bp, Artificial Sequence
  Description of Artificial Sequence: Synthetic oligonucleotide
gtttatttgtagttcggacgttt

SEQ ID NO: 7316 - DNA, 19 bp, Artificial Sequence
  Description of Artificial Sequence: Synthetic oligonucleotide
accgactcgtcccatctta

SEQ ID NO: 7317 - DNA, 20 bp, Artificial Sequence
  Description of Artificial Sequence: Synthetic oligonucleotide
cctcgctcctacgctctaac

SEQ ID NO: 7318 - DNA, 20 bp, Artificial Sequence
  Description of Artificial Sequence: Synthetic oligonucleotide
ctcgctcctacgctctaacc

SEQ ID NO: 7319 - DNA, 21 bp, Artificial Sequence
  Description of Artificial Sequence: Synthetic oligonucleotide
accgtaaacctccgtcctatt

SEQ ID NO: 7320 - DNA, 19 bp, Artificial Sequence
  Description of Artificial Sequence: Synthetic oligonucleotide
tttcgacgtgacgagagtt

SEQ ID NO: 7321 - DNA, 22 bp, Artificial Sequence
  Description of Artificial Sequence: Synthetic oligonucleotide
ccaactacgactctaccgaaac

SEQ ID NO: 7322 - DNA, 23 bp, Artificial Sequence
  Description of Artificial Sequence: Synthetic oligonucleotide
ttttgcgttttgatttacgttat

SEQ ID NO: 7323 - DNA, 24 bp, Artificial Sequence
  Description of Artificial Sequence: Synthetic oligonucleotide
agggaggttggagcgcgagaaagg

SEQ ID NO: 7324 - DNA, 22 bp, Artificial Sequence
  Description of Artificial Sequence: Synthetic oligonucleotide
aaccaactacgactctaccgaa

SEQ ID NO: 7325 - DNA, 22 bp, Artificial Sequence
  Description of Artificial Sequence: Synthetic oligonucleotide
acgataaccaataaacgacgac

SEQ ID NO: 7326 - DNA, 21 bp, Artificial Sequence
  Description of Artificial Sequence: Synthetic oligonucleotide
cgtggtaggcgagaattttat

SEQ ID NO: 7327 - DNA, 33 bp, Artificial Sequence
  Description of Artificial Sequence: Synthetic oligonucleotide
atgtatcgatggtaaacgttaacggaagttggt

SEQ ID NO: 7328 - DNA, 22 bp, Artificial Sequence
  Description of Artificial Sequence: Synthetic oligonucleotide
tttgcgttttgatttacgttat

SEQ ID NO: 7329 - DNA, 22 bp, Artificial Sequence
  Description of Artificial Sequence: Synthetic oligonucleotide
cgataaccaataaacgacgact

SEQ ID NO: 7330 - DNA, 21 bp, Artificial Sequence
  Description of Artificial Sequence: Synthetic oligonucleotide
gtttttgcgttttgatttacg

SEQ ID NO: 7331 - DNA, 22 bp, Artificial Sequence
  Description of Artificial Sequence: Synthetic oligonucleotide
aacgataaccaataaacgacga

SEQ ID NO: 7332 - DNA, 22 bp, Artificial Sequence
  Description of Artificial Sequence: Synthetic oligonucleotide
tcaaccaactacgactctaccg

SEQ ID NO: 7333 - DNA, 22 bp, Artificial Sequence
  Description of Artificial Sequence: Synthetic oligonucleotide
ttgatttacgttatcggttcgt

SEQ ID NO: 7334 - DNA, 21 bp, Artificial Sequence
  Description of Artificial Sequence: Synthetic oligonucleotide
caaccaactacgactctaccg

SEQ ID NO: 7335 - DNA, 22 bp, Artificial Sequence
  Description of Artificial Sequence: Synthetic oligonucleotide
tttgatttacgttatcggttcg

SEQ ID NO: 7336 - DNA, 22 bp, Artificial Sequence
  Description of Artificial Sequence: Synthetic oligonucleotide
taaatctataccgaaaatccgc

SEQ ID NO: 7337 - DNA, 21 bp, Artificial Sequence
  Description of Artificial Sequence: Synthetic oligonucleotide
tgtcgtttagggtcgagagat

SEQ ID NO: 7338 - DNA, 41 bp, Artificial Sequence
  Description of Artificial Sequence: Synthetic oligonucleotide
ttcgcgttcgaatgttcgtgtgggtagatttgttgtggcgg

SEQ ID NO: 7339 - DNA, 22 bp, Artificial Sequence
  Description of Artificial Sequence: Synthetic oligonucleotide
caaccaactacgactctaccga

SEQ ID NO: 7340 - DNA, 23 bp, Artificial Sequence
  Description of Artificial Sequence: Synthetic oligonucleotide
ccaataaacgacgactaataacg

SEQ ID NO: 7341 - DNA, 21 bp, Artificial Sequence
  Description of Artificial Sequence: Synthetic oligonucleotide
gcaaaataaaacgaatcgacc

SEQ ID NO: 7342 - DNA, 22 bp, Artificial Sequence
  Description of Artificial Sequence: Synthetic oligonucleotide
attgtagcgtttacgagaggtt

SEQ ID NO: 7343 - DNA, 38 bp, Artificial Sequence
  Description of Artificial Sequence: Synthetic oligonucleotide
ttcgatggggcgagtagaaggggaggttttcgttacgt

SEQ ID NO: 7344 - DNA, 22 bp, Artificial Sequence
  Description of Artificial Sequence: Synthetic oligonucleotide
acgctacaataaaacgaaaacc

SEQ ID NO: 7345 - DNA, 20 bp, Artificial Sequence
  Description of Artificial Sequence: Synthetic oligonucleotide
cgtggtaggcgagaatttta

SEQ ID NO: 7346 - DNA, 39 bp, Artificial Sequence
  Description of Artificial Sequence: Synthetic oligonucleotide
agcggaattcgttattagtcgtcgtttattggttatcgt

SEQ ID NO: 7347 - DNA, 23 bp, Artificial Sequence
  Description of Artificial Sequence: Synthetic oligonucleotide
tgatttacgttatcggttcgtat

SEQ ID NO: 7348 - DNA, 20 bp, Artificial Sequence
  Description of Artificial Sequence: Synthetic oligonucleotide
ttgtcgtttagggtcgagag

SEQ ID NO: 7349 - DNA, 20 bp, Artificial Sequence
  Description of Artificial Sequence: Synthetic oligonucleotide
ttttgtcgtttagggtcgag

SEQ ID NO: 7350 - DNA, 21 bp, Artificial Sequence
  Description of Artificial Sequence: Synthetic oligonucleotide
cgctaacacctacctaccgac

SEQ ID NO: 7351 - DNA, 22 bp, Artificial Sequence
  Description of Artificial Sequence: Synthetic oligonucleotide
atttagggttttcgttcgtgat

SEQ ID NO: 7352 - DNA, 33 bp, Artificial Sequence
  Description of Artificial Sequence: Synthetic oligonucleotide
tagggttttcgttgtttttggtcggtaggcgtt

SEQ ID NO: 7353 - DNA, 22 bp, Artificial Sequence
  Description of Artificial Sequence: Synthetic oligonucleotide
cgtaaacgctacaataaaacga

SEQ ID NO: 7354 - DNA, 21 bp, Artificial Sequence
  Description of Artificial Sequence: Synthetic oligonucleotide
tttttgtcgtttagggtcgag

SEQ ID NO: 7355 - DNA, 23 bp, Artificial Sequence
  Description of Artificial Sequence: Synthetic oligonucleotide
accaactacgactctaccgaaac

SEQ ID NO: 7356 - DNA, 21 bp, Artificial Sequence
  Description of Artificial Sequence: Synthetic oligonucleotide
tcgtttagggtcgagagattg

SEQ ID NO: 7357 - DNA, 21 bp, Artificial Sequence
  Description of Artificial Sequence: Synthetic oligonucleotide
tttgtcgtttagggtcgagag

SEQ ID NO: 7358 - DNA, 20 bp, Artificial Sequence
  Description of Artificial Sequence: Synthetic oligonucleotide
aaacgaatcgacctctctcc

SEQ ID NO: 7359 - DNA, 22 bp, Artificial Sequence
  Description of Artificial Sequence: Synthetic oligonucleotide
cgttttattgtagcgtttacga

SEQ ID NO: 7360 - DNA, 23 bp, Artificial Sequence
  Description of Artificial Sequence: Synthetic oligonucleotide
ctaaatctataccgaaaatccgc

SEQ ID NO: 7361 - DNA, 20 bp, Artificial Sequence
  Description of Artificial Sequence: Synthetic oligonucleotide
cgtttagggtcgagagattg

SEQ ID NO: 7362 - DNA, 23 bp, Artificial Sequence
  Description of Artificial Sequence: Synthetic oligonucleotide
atcaaccaactacgactctaccg

SEQ ID NO: 7363 - DNA, 22 bp, Artificial Sequence
  Description of Artificial Sequence: Synthetic oligonucleotide
ttattgtagcgtttacgagagg

SEQ ID NO: 7364 - DNA, 22 bp, Artificial Sequence
  Description of Artificial Sequence: Synthetic oligonucleotide
ttttgatttacgttatcggttc

SEQ ID NO: 7365 - DNA, 23 bp, Artificial Sequence
  Description of Artificial Sequence: Synthetic oligonucleotide
tattgtagcgtttacgagaggtt

SEQ ID NO: 7366 - DNA, 20 bp, Artificial Sequence
  Description of Artificial Sequence: Synthetic oligonucleotide
acgtagattaggttcgtggg

SEQ ID NO: 7367 - DNA, 23 bp, Artificial Sequence
  Description of Artificial Sequence: Synthetic oligonucleotide
gttttgatttacgttatcggttc

SEQ ID NO: 7368 - DNA, 21 bp, Artificial Sequence
  Description of Artificial Sequence: Synthetic oligonucleotide
tagggttttcgttcgtgattt

SEQ ID NO: 7369 - DNA, 21 bp, Artificial Sequence
  Description of Artificial Sequence: Synthetic oligonucleotide
ttagggttttcgttcgtgatt

SEQ ID NO: 7370 - DNA, 21 bp, Artificial Sequence
  Description of Artificial Sequence: Synthetic oligonucleotide
gatttagggttttcgttcgtg

SEQ ID NO: 7371 - DNA, 21 bp, Artificial Sequence
  Description of Artificial Sequence: Synthetic oligonucleotide
tttagggttttcgttcgtgat

SEQ ID NO: 7372 - DNA, 21 bp, Artificial Sequence
  Description of Artificial Sequence: Synthetic oligonucleotide
cgcaaaataaaacgaatcgac

SEQ ID NO: 7373 - DNA, 20 bp, Artificial Sequence
  Description of Artificial Sequence: Synthetic oligonucleotide
tttttgcgttttgatttacg

SEQ ID NO: 7374 - DNA, 21 bp, Artificial Sequence
  Description of Artificial Sequence: Synthetic oligonucleotide
aaatctataccgaaaatccgc

SEQ ID NO: 7375 - DNA, 21 bp, Artificial Sequence
  Description of Artificial Sequence: Synthetic oligonucleotide
aacctctcgtaaacgctacaa

SEQ ID NO: 7376 - DNA, 21 bp, Artificial Sequence
  Description of Artificial Sequence: Synthetic oligonucleotide
gtagcgtttacgagaggttgg

SEQ ID NO: 7377 - DNA, 32 bp, Artificial Sequence
  Description of Artificial Sequence: Synthetic oligonucleotide
ggggcgagtagaaggggaggttttcgttacgt

SEQ ID NO: 7378 - DNA, 20 bp, Artificial Sequence
  Description of Artificial Sequence: Synthetic oligonucleotide
ctcgacgtaacgaaaacctc

SEQ ID NO: 7379 - DNA, 23 bp, Artificial Sequence
  Description of Artificial Sequence: Synthetic oligonucleotide
cgttattagtcgtcgtttattgg

SEQ ID NO: 7380 - DNA, 32 bp, Artificial Sequence
  Description of Artificial Sequence: Synthetic oligonucleotide
agcgtttacgagaggttggttcgatggggcga

SEQ ID NO: 7381 - DNA, 22 bp, Artificial Sequence
  Description of Artificial Sequence: Synthetic oligonucleotide
accaactacgactctaccgaaa

SEQ ID NO: 7382 - DNA, 20 bp, Artificial Sequence
  Description of Artificial Sequence: Synthetic oligonucleotide
tagattaggttcgtgggcgt

SEQ ID NO: 7383 - DNA, 20 bp, Artificial Sequence
  Description of Artificial Sequence: Synthetic oligonucleotide
cgtagattaggttcgtgggc

SEQ ID NO: 7384 - DNA, 20 bp, Artificial Sequence
  Description of Artificial Sequence: Synthetic oligonucleotide
gtagattaggttcgtgggcg

SEQ ID NO: 7385 - DNA, 20 bp, Artificial Sequence
  Description of Artificial Sequence: Synthetic oligonucleotide
ctcgaccctaaacgacaaaa

SEQ ID NO: 7386 - DNA, 22 bp, Artificial Sequence
  Description of Artificial Sequence: Synthetic oligonucleotide
gtttacgagaggttggttcgat

SEQ ID NO: 7387 - DNA, 23 bp, Artificial Sequence
  Description of Artificial Sequence: Synthetic oligonucleotide
tctaaatctataccgaaaatccg

SEQ ID NO: 7388 - DNA, 21 bp, Artificial Sequence
  Description of Artificial Sequence: Synthetic oligonucleotide
cgtttagggtcgagagattgt

SEQ ID NO: 7389 - DNA, 20 bp, Artificial Sequence
  Description of Artificial Sequence: Synthetic oligonucleotide
tagcgtttacgagaggttgg

SEQ ID NO: 7390 - DNA, 22 bp, Artificial Sequence
  Description of Artificial Sequence: Synthetic oligonucleotide
caaacgataaccaataaacgac

SEQ ID NO: 7391 - DNA, 22 bp, Artificial Sequence
  Description of Artificial Sequence: Synthetic oligonucleotide
gacaaacgataaccaataaacg

SEQ ID NO: 7392 - DNA, 24 bp, Artificial Sequence
  Description of Artificial Sequence: Synthetic oligonucleotide
ctctaaatctataccgaaaatccg

SEQ ID NO: 7393 - DNA, 21 bp, Artificial Sequence
  Description of Artificial Sequence: Synthetic oligonucleotide
tgtagcgtttacgagaggttg

SEQ ID NO: 7394 - DNA, 22 bp, Artificial Sequence
  Description of Artificial Sequence: Synthetic oligonucleotide
accgataacgtaaatcaaaacg

SEQ ID NO: 7395 - DNA, 19 bp, Artificial Sequence
  Description of Artificial Sequence: Synthetic oligonucleotide
aacgggtttcgtagtcgtg

SEQ ID NO: 7396 - DNA, 29 bp, Artificial Sequence
  Description of Artificial Sequence: Synthetic oligonucleotide
aacgtagattaggttcgtgggcgtttcgt

SEQ ID NO: 7397 - DNA, 22 bp, Artificial Sequence
  Description of Artificial Sequence: Synthetic oligonucleotide
taacgtaaatcaaaacgcaaaa

SEQ ID NO: 7398 - DNA, 19 bp, Artificial Sequence
  Description of Artificial Sequence: Synthetic oligonucleotide
gaacgggtttcgtagtcgt

SEQ ID NO: 7399 - DNA, 31 bp, Artificial Sequence
  Description of Artificial Sequence: Synthetic oligonucleotide
tgcggtttagaaacgtagattaggttcgtgg

SEQ ID NO: 7400 - DNA, 19 bp, Artificial Sequence
  Description of Artificial Sequence: Synthetic oligonucleotide
tagattaggttcgtgggcg

SEQ ID NO: 7401 - DNA, 23 bp, Artificial Sequence
  Description of Artificial Sequence: Synthetic oligonucleotide
aacgctacaataaaacgaaaacc

SEQ ID NO: 7402 - DNA, 21 bp, Artificial Sequence
  Description of Artificial Sequence: Synthetic oligonucleotide
aaccaactacgactctaccga

SEQ ID NO: 7403 - DNA, 23 bp, Artificial Sequence
  Description of Artificial Sequence: Synthetic oligonucleotide
gatttacgttatcggttcgtatt

SEQ ID NO: 7404 - DNA, 21 bp, Artificial Sequence
  Description of Artificial Sequence: Synthetic oligonucleotide
tttacgagaggttggttcgat

SEQ ID NO: 7405 - DNA, 22 bp, Artificial Sequence
  Description of Artificial Sequence: Synthetic oligonucleotide
ccacgacaaacgataaccaata

SEQ ID NO: 7406 - DNA, 37 bp, Artificial Sequence
  Description of Artificial Sequence: Synthetic oligonucleotide
aacggaagttggtatagcggaattcgttattagtcgt

SEQ ID NO: 7407 - DNA, 21 bp, Artificial Sequence
  Description of Artificial Sequence: Synthetic oligonucleotide
ttgcgttttgatttacgttat

SEQ ID NO: 7408 - DNA, 21 bp, Artificial Sequence
  Description of Artificial Sequence: Synthetic oligonucleotide
ttgtagcgtttacgagaggtt

SEQ ID NO: 7409 - DNA, 21 bp, Artificial Sequence
  Description of Artificial Sequence: Synthetic oligonucleotide
gtcgtttagggtcgagagatt

SEQ ID NO: 7410 - DNA, 20 bp, Artificial Sequence
  Description of Artificial Sequence: Synthetic oligonucleotide
taactacgctcgcctctacc

SEQ ID NO: 7411 - DNA, 21 bp, Artificial Sequence
  Description of Artificial Sequence: Synthetic oligonucleotide
cgagagaggtacggaagaaag

SEQ ID NO: 7412 - DNA, 25 bp, Artificial Sequence
  Description of Artificial Sequence: Synthetic oligonucleotide
gtgggagcgtagtcggtgtcggatt

SEQ ID NO: 7413 - DNA, 22 bp, Artificial Sequence
  Description of Artificial Sequence: Synthetic oligonucleotide
acgaaccgataacgtaaatcaa

SEQ ID NO: 7414 - DNA, 40 bp, Artificial Sequence
  Description of Artificial Sequence: Synthetic oligonucleotide
tgcggtttagaaacgtagattaggttcgtgggcgtttcgt

SEQ ID NO: 7415 - DNA, 21 bp, Artificial Sequence
  Description of Artificial Sequence: Synthetic oligonucleotide
aaacccacgacaaacgataac

SEQ ID NO: 7416 - DNA, 22 bp, Artificial Sequence
  Description of Artificial Sequence: Synthetic oligonucleotide
cgctacaataaaacgaaaaccc

SEQ ID NO: 7417 - DNA, 23 bp, Artificial Sequence
  Description of Artificial Sequence: Synthetic oligonucleotide
tcgtaaacgctacaataaaacga

SEQ ID NO: 7418 - DNA, 31 bp, Artificial Sequence
  Description of Artificial Sequence: Synthetic oligonucleotide
gtttagaaacgtagattaggttcgtgggcgt

SEQ ID NO: 7419 - DNA, 18 bp, Artificial Sequence
  Description of Artificial Sequence: Synthetic oligonucleotide
attaggttcgtgggcgtt

SEQ ID NO: 7420 - DNA, 20 bp, Artificial Sequence
  Description of Artificial Sequence: Synthetic oligonucleotide
aaaacccacgacaaacgata

SEQ ID NO: 7421 - DNA, 22 bp, Artificial Sequence
  Description of Artificial Sequence: Synthetic oligonucleotide
ttgtagcgtttacgagaggttg

SEQ ID NO: 7422 - DNA, 22 bp, Artificial Sequence
  Description of Artificial Sequence: Synthetic oligonucleotide
taagtaattttgttatcgggcg

SEQ ID NO: 7423 - DNA, 21 bp, Artificial Sequence
  Description of Artificial Sequence: Synthetic oligonucleotide
aaaaacgacgaatacctctcc

SEQ ID NO: 7424 - DNA, 47 bp, Artificial Sequence
  Description of Artificial Sequence: Synthetic oligonucleotide
ttaattcgtgtgggggttgatattaatataagtagtcgttttttcgg

SEQ ID NO: 7425 - DNA, 21 bp, Artificial Sequence
  Description of Artificial Sequence: Synthetic oligonucleotide
aagtaattttgttatcgggcg

SEQ ID NO: 7426 - DNA, 20 bp, Artificial Sequence
  Description of Artificial Sequence: Synthetic oligonucleotide
cgaacctaaaatcccactcg

SEQ ID NO: 7427 - DNA, 19 bp, Artificial Sequence
  Description of Artificial Sequence: Synthetic oligonucleotide
tttttatatcgggcgtcgt

SEQ ID NO: 7428 - DNA, 22 bp, Artificial Sequence
  Description of Artificial Sequence: Synthetic oligonucleotide
acgaaactaaactccgcttacc

SEQ ID NO: 7429 - DNA, 20 bp, Artificial Sequence
  Description of Artificial Sequence: Synthetic oligonucleotide
attgcgcgtggggggcgagg

SEQ ID NO: 7430 - DNA, 21 bp, Artificial Sequence
  Description of Artificial Sequence: Synthetic oligonucleotide
ctcccgaacgaaactaaactc

SEQ ID NO: 7431 - DNA, 21 bp, Artificial Sequence
  Description of Artificial Sequence: Synthetic oligonucleotide
cgaaactaaactccgcttacc

SEQ ID NO: 7432 - DNA, 22 bp, Artificial Sequence
  Description of Artificial Sequence: Synthetic oligonucleotide
aacgaaactaaactccgcttac

SEQ ID NO: 7433 - DNA, 20 bp, Artificial Sequence
  Description of Artificial Sequence: Synthetic oligonucleotide
aaaacgacgaatacctctcc

SEQ ID NO: 7434 - DNA, 21 bp, Artificial Sequence
  Description of Artificial Sequence: Synthetic oligonucleotide
gaacgaaactaaactccgctt

SEQ ID NO: 7435 - DNA, 22 bp, Artificial Sequence
  Description of Artificial Sequence: Synthetic oligonucleotide
cgtataagaatagaggagcggg

SEQ ID NO: 7436 - DNA, 20 bp, Artificial Sequence
  Description of Artificial Sequence: Synthetic oligonucleotide
taacaacaaaatcgccgaaa

SEQ ID NO: 7437 - DNA, 30 bp, Artificial Sequence
  Description of Artificial Sequence: Synthetic oligonucleotide
gacggtttcgttgtttattgggtaagcgga

SEQ ID NO: 7438 - DNA, 20 bp, Artificial Sequence
  Description of Artificial Sequence: Synthetic oligonucleotide
agtaattttgttatcgggcg

SEQ ID NO: 7439 - DNA, 20 bp, Artificial Sequence
  Description of Artificial Sequence: Synthetic oligonucleotide
gtaattttgttatcgggcgg

SEQ ID NO: 7440 - DNA, 19 bp, Artificial Sequence
  Description of Artificial Sequence: Synthetic oligonucleotide
ggcgtcgtcgttttaattg

SEQ ID NO: 7441 - DNA, 24 bp, Artificial Sequence
  Description of Artificial Sequence: Synthetic oligonucleotide
aggagcgggggagaagagacggtt

SEQ ID NO: 7442 - DNA, 19 bp, Artificial Sequence
  Description of Artificial Sequence: Synthetic oligonucleotide
taattttgttatcgggcgg

SEQ ID NO: 7443 - DNA, 30 bp, Artificial Sequence
  Description of Artificial Sequence: Synthetic oligonucleotide
agacggtttcgttgtttattgggtaagcgg

SEQ ID NO: 7444 - DNA, 19 bp, Artificial Sequence
  Description of Artificial Sequence: Synthetic oligonucleotide
gcgtcgtcgttttaattgc

SEQ ID NO: 7445 - DNA, 19 bp, Artificial Sequence
  Description of Artificial Sequence: Synthetic oligonucleotide
acaacaaaatcgccgaaaa

SEQ ID NO: 7446 - DNA, 19 bp, Artificial Sequence
  Description of Artificial Sequence: Synthetic oligonucleotide
aacaacaaaatcgccgaaa

SEQ ID NO: 7447 - DNA, 20 bp, Artificial Sequence
  Description of Artificial Sequence: Synthetic oligonucleotide
aaacgacgaatacctctccc

SEQ ID NO: 7448 - DNA, 20 bp, Artificial Sequence
  Description of Artificial Sequence: Synthetic oligonucleotide
taattttgttatcgggcggt

SEQ ID NO: 7449 - DNA, 18 bp, Artificial Sequence
  Description of Artificial Sequence: Synthetic oligonucleotide
gggcgtcgtcgttttaat

SEQ ID NO: 7450 - DNA, 21 bp, Artificial Sequence
  Description of Artificial Sequence: Synthetic oligonucleotide
ccaataaacaacgaaaccgtc

SEQ ID NO: 7451 - DNA, 20 bp, Artificial Sequence
  Description of Artificial Sequence: Synthetic oligonucleotide
aacgaaaccgtctcttctcc

SEQ ID NO: 7452 - DNA, 18 bp, Artificial Sequence
  Description of Artificial Sequence: Synthetic oligonucleotide
caacaaaatcgccgaaaa

SEQ ID NO: 7453 - DNA, 20 bp, Artificial Sequence
  Description of Artificial Sequence: Synthetic oligonucleotide
caacgaaaccgtctcttctc

SEQ ID NO: 7454 - DNA, 21 bp, Artificial Sequence
  Description of Artificial Sequence: Synthetic oligonucleotide
aaaacgacgaatacctctccc

SEQ ID NO: 7455 - DNA, 20 bp, Artificial Sequence
  Description of Artificial Sequence: Synthetic oligonucleotide
cccgaacgaaactaaactcc

SEQ ID NO: 7456 - DNA, 21 bp, Artificial Sequence
  Description of Artificial Sequence: Synthetic oligonucleotide
cgtataagaatagaggagcgg

SEQ ID NO: 7457 - DNA, 21 bp, Artificial Sequence
  Description of Artificial Sequence: Synthetic oligonucleotide
gctcccgaacgaaactaaact

SEQ ID NO: 7458 - DNA, 31 bp, Artificial Sequence
  Description of Artificial Sequence: Synthetic oligonucleotide
ggagaagagacggtttcgttgtttattgggt

SEQ ID NO: 7459 - DNA, 18 bp, Artificial Sequence
  Description of Artificial Sequence: Synthetic oligonucleotide
ttagtttcgttcgggagc

SEQ ID NO: 7460 - DNA, 22 bp, Artificial Sequence
  Description of Artificial Sequence: Synthetic oligonucleotide
ccgtacttttctctcgtcctta

SEQ ID NO: 7461 - DNA, 31 bp, Artificial Sequence
  Description of Artificial Sequence: Synthetic oligonucleotide
ttcggcgattttgttgttaattcgagtcggt

SEQ ID NO: 7462 - DNA, 19 bp, Artificial Sequence
  Description of Artificial Sequence: Synthetic oligonucleotide
attttgttatcgggcggtt

SEQ ID NO: 7463 - DNA, 18 bp, Artificial Sequence
  Description of Artificial Sequence: Synthetic oligonucleotide
aattttgttatcgggcgg

SEQ ID NO: 7464 - DNA, 20 bp, Artificial Sequence
  Description of Artificial Sequence: Synthetic oligonucleotide
tcccgaacgaaactaaactc

SEQ ID NO: 7465 - DNA, 18 bp, Artificial Sequence
  Description of Artificial Sequence: Synthetic oligonucleotide
attttgttatcgggcggt

SEQ ID NO: 7466 - DNA, 18 bp, Artificial Sequence
  Description of Artificial Sequence: Synthetic oligonucleotide
ttttatatcgggcgtcgt

SEQ ID NO: 7467 - DNA, 23 bp, Artificial Sequence
  Description of Artificial Sequence: Synthetic oligonucleotide
cgacctcgctactcactaaataa

SEQ ID NO: 7468 - DNA, 22 bp, Artificial Sequence
  Description of Artificial Sequence: Synthetic oligonucleotide
gagttggtagtaaaatcgtcgg

SEQ ID NO: 7469 - DNA, 25 bp, Artificial Sequence
  Description of Artificial Sequence: Synthetic oligonucleotide
tgttcgttttcgagcggggttgggt

SEQ ID NO: 7470 - DNA, 21 bp, Artificial Sequence
  Description of Artificial Sequence: Synthetic oligonucleotide
aaaaacgacctcgctactcac

SEQ ID NO: 7471 - DNA, 21 bp, Artificial Sequence
  Description of Artificial Sequence: Synthetic oligonucleotide
acttccttctacatcgaacgc

SEQ ID NO: 7472 - DNA, 22 bp, Artificial Sequence
  Description of Artificial Sequence: Synthetic oligonucleotide
ttagtgagtagcgaggtcgttt

SEQ ID NO: 7473 - DNA, 28 bp, Artificial Sequence
  Description of Artificial Sequence: Synthetic oligonucleotide
gggtgggcgtttcgttttttacgcgtag

SEQ ID NO: 7474 - DNA, 22 bp, Artificial Sequence
  Description of Artificial Sequence: Synthetic oligonucleotide
aacgacctcgctactcactaaa

SEQ ID NO: 7475 - DNA, 21 bp, Artificial Sequence
  Description of Artificial Sequence: Synthetic oligonucleotide
gttggtagtaaaatcgtcggg

SEQ ID NO: 7476 - DNA, 22 bp, Artificial Sequence
  Description of Artificial Sequence: Synthetic oligonucleotide
aaacgacctcgctactcactaa

SEQ ID NO: 7477 - DNA, 23 bp, Artificial Sequence
  Description of Artificial Sequence: Synthetic oligonucleotide
cctcgctactcactaaataaacg

SEQ ID NO: 7478 - DNA, 23 bp, Artificial Sequence
  Description of Artificial Sequence: Synthetic oligonucleotide
cgattcgagttggtagtaaaatc

SEQ ID NO: 7479 - DNA, 22 bp, Artificial Sequence
  Description of Artificial Sequence: Synthetic oligonucleotide
atttagtgagtagcgaggtcgt

SEQ ID NO: 7480 - DNA, 22 bp, Artificial Sequence
  Description of Artificial Sequence: Synthetic oligonucleotide
acgacctcgctactcactaaat

SEQ ID NO: 7481 - DNA, 24 bp, Artificial Sequence
  Description of Artificial Sequence: Synthetic oligonucleotide
acctcgctactcactaaataaacg

SEQ ID NO: 7482 - DNA, 20 bp, Artificial Sequence
  Description of Artificial Sequence: Synthetic oligonucleotide
ttggtagtaaaatcgtcggg

SEQ ID NO: 7483 - DNA, 22 bp, Artificial Sequence
  Description of Artificial Sequence: Synthetic oligonucleotide
agttggtagtaaaatcgtcggg

SEQ ID NO: 7484 - DNA, 23 bp, Artificial Sequence
  Description of Artificial Sequence: Synthetic oligonucleotide
ttcgagttggtagtaaaatcgtc

SEQ ID NO: 7485 - DNA, 20 bp, Artificial Sequence
  Description of Artificial Sequence: Synthetic oligonucleotide
cttccttctacatcgaacgc

SEQ ID NO: 7486 - DNA, 21 bp, Artificial Sequence
  Description of Artificial Sequence: Synthetic oligonucleotide
aaaacgacctcgctactcact

SEQ ID NO: 7487 - DNA, 22 bp, Artificial Sequence
  Description of Artificial Sequence: Synthetic oligonucleotide
cgattcgagttggtagtaaaat

SEQ ID NO: 7488 - DNA, 22 bp, Artificial Sequence
  Description of Artificial Sequence: Synthetic oligonucleotide
agtgagtagcgaggtcgttttt

SEQ ID NO: 7489 - DNA, 22 bp, Artificial Sequence
  Description of Artificial Sequence: Synthetic oligonucleotide
aaaaacgacctcgctactcact

SEQ ID NO: 7490 - DNA, 23 bp, Artificial Sequence
  Description of Artificial Sequence: Synthetic oligonucleotide
tcgctactcactaaataaacgaa

SEQ ID NO: 7491 - DNA, 26 bp, Artificial Sequence
  Description of Artificial Sequence: Synthetic oligonucleotide
tttgttcgttttcgagcggggttggg

SEQ ID NO: 7492 - DNA, 21 bp, Artificial Sequence
  Description of Artificial Sequence: Synthetic oligonucleotide
gtgagtagcgaggtcgttttt

SEQ ID NO: 7493 - DNA, 24 bp, Artificial Sequence
  Description of Artificial Sequence: Synthetic oligonucleotide
ctcgctactcactaaataaacgaa

SEQ ID NO: 7494 - DNA, 22 bp, Artificial Sequence
  Description of Artificial Sequence: Synthetic oligonucleotide
tcgagttggtagtaaaatcgtc

SEQ ID NO: 7495 - DNA, 23 bp, Artificial Sequence
  Description of Artificial Sequence: Synthetic oligonucleotide
cgtttatttagtgagtagcgagg

SEQ ID NO: 7496 - DNA, 20 bp, Artificial Sequence
  Description of Artificial Sequence: Synthetic oligonucleotide
aaaacgacctcgctactcac

SEQ ID NO: 7497 - DNA, 23 bp, Artificial Sequence
  Description of Artificial Sequence: Synthetic oligonucleotide
tatttagtgagtagcgaggtcgt

SEQ ID NO: 7498 - DNA, 24 bp, Artificial Sequence
  Description of Artificial Sequence: Synthetic oligonucleotide
attcgagttggtagtaaaatcgtc

SEQ ID NO: 7499 - DNA, 24 bp, Artificial Sequence
  Description of Artificial Sequence: Synthetic oligonucleotide
gattcgagttggtagtaaaatcgt

SEQ ID NO: 7500 - DNA, 22 bp, Artificial Sequence
  Description of Artificial Sequence: Synthetic oligonucleotide
caattctatcaccgaacgatct

SEQ ID NO: 7501 - DNA, 20 bp, Artificial Sequence
  Description of Artificial Sequence: Synthetic oligonucleotide
cggatttgggattttattcg

SEQ ID NO: 7502 - DNA, 47 bp, Artificial Sequence
  Description of Artificial Sequence: Synthetic oligonucleotide
gaagaggcggttgtttatgttaatattagtttttatacgaattagaa

SEQ ID NO: 7503 - DNA, 22 bp, Artificial Sequence
  Description of Artificial Sequence: Synthetic oligonucleotide
aacaattctatcaccgaacgat

SEQ ID NO: 7504 - DNA, 47 bp, Artificial Sequence
  Description of Artificial Sequence: Synthetic oligonucleotide
agaggcggttgtttatgttaatattagtttttatacgaattagaaaa

SEQ ID NO: 7505 - DNA, 21 bp, Artificial Sequence
  Description of Artificial Sequence: Synthetic oligonucleotide
tagtgagtagcgaggtcgttt

SEQ ID NO: 7506 - DNA, 21 bp, Artificial Sequence
  Description of Artificial Sequence: Synthetic oligonucleotide
tttagtgagtagcgaggtcgt

SEQ ID NO: 7507 - DNA, 20 bp, Artificial Sequence
  Description of Artificial Sequence: Synthetic oligonucleotide
tgagtagcgaggtcgttttt

SEQ ID NO: 7508 - DNA, 19 bp, Artificial Sequence
  Description of Artificial Sequence: Synthetic oligonucleotide
tccttctacatcgaacgcc

SEQ ID NO: 7509 - DNA, 22 bp, Artificial Sequence
  Description of Artificial Sequence: Synthetic oligonucleotide
tagtgagtagcgaggtcgtttt

SEQ ID NO: 7510 - DNA, 20 bp, Artificial Sequence
  Description of Artificial Sequence: Synthetic oligonucleotide
tggtagtaaaatcgtcgggg

SEQ ID NO: 7511 - DNA, 24 bp, Artificial Sequence
  Description of Artificial Sequence: Synthetic oligonucleotide
ttatttagtgagtagcgaggtcgt

SEQ ID NO: 7512 - DNA, 19 bp, Artificial Sequence
  Description of Artificial Sequence: Synthetic oligonucleotide
aaaaacgaaataaccccga

SEQ ID NO: 7513 - DNA, 22 bp, Artificial Sequence
  Description of Artificial Sequence: Synthetic oligonucleotide
agatcgttcggtgatagaattg

SEQ ID NO: 7514 - DNA, 30 bp, Artificial Sequence
  Description of Artificial Sequence: Synthetic oligonucleotide
tgaattcgtaagggagggggaagaacgttt

SEQ ID NO: 7515 - DNA, 19 bp, Artificial Sequence
  Description of Artificial Sequence: Synthetic oligonucleotide
gtagtaaaatcgtcggggg

SEQ ID NO: 7516 - DNA, 19 bp, Artificial Sequence
  Description of Artificial Sequence: Synthetic oligonucleotide
ggtagtaaaatcgtcgggg

SEQ ID NO: 7517 - DNA, 24 bp, Artificial Sequence
  Description of Artificial Sequence: Synthetic oligonucleotide
ttcgtttatttagtgagtagcgag

SEQ ID NO: 7518 - DNA, 22 bp, Artificial Sequence
  Description of Artificial Sequence: Synthetic oligonucleotide
taaacaattctatcaccgaacg

SEQ ID NO: 7519 - DNA, 23 bp, Artificial Sequence
  Description of Artificial Sequence: Synthetic oligonucleotide
aaaacgacctcgctactcactaa

SEQ ID NO: 7520 - DNA, 24 bp, Artificial Sequence
  Description of Artificial Sequence: Synthetic oligonucleotide
acgacctcgctactcactaaataa

SEQ ID NO: 7521 - DNA, 24 bp, Artificial Sequence
  Description of Artificial Sequence: Synthetic oligonucleotide
tcgtttatttagtgagtagcgagg

SEQ ID NO: 7522 - DNA, 19 bp, Artificial Sequence
  Description of Artificial Sequence: Synthetic oligonucleotide
ttccttctacatcgaacgc

SEQ ID NO: 7523 - DNA, 25 bp, Artificial Sequence
  Description of Artificial Sequence: Synthetic oligonucleotide
tttcgtttatttagtgagtagcgag

SEQ ID NO: 7524 - DNA, 23 bp, Artificial Sequence
  Description of Artificial Sequence: Synthetic oligonucleotide
ataaacaattctatcaccgaacg

SEQ ID NO: 7525 - DNA, 25 bp, Artificial Sequence
  Description of Artificial Sequence: Synthetic oligonucleotide
gacctcgctactcactaaataaacg

SEQ ID NO: 7526 - DNA, 21 bp, Artificial Sequence
  Description of Artificial Sequence: Synthetic oligonucleotide
agtgagtagcgaggtcgtttt

SEQ ID NO: 7527 - DNA, 23 bp, Artificial Sequence
  Description of Artificial Sequence: Synthetic oligonucleotide
aaacaattctatcaccgaacgat

SEQ ID NO: 7528 - DNA, 23 bp, Artificial Sequence
  Description of Artificial Sequence: Synthetic oligonucleotide
acaattctatcaccgaacgatct

SEQ ID NO: 7529 - DNA, 18 bp, Artificial Sequence
  Description of Artificial Sequence: Synthetic oligonucleotide
taaacaaccgcctcttcg

SEQ ID NO: 7530 - DNA, 22 bp, Artificial Sequence
  Description of Artificial Sequence: Synthetic oligonucleotide
gtcgttcgttcgagtttatacg

SEQ ID NO: 7531 - DNA, 39 bp, Artificial Sequence
  Description of Artificial Sequence: Synthetic oligonucleotide
ttcgagtgaagggggcggcgggtgtttttttcgtatcgt

SEQ ID NO: 7532 - DNA, 18 bp, Artificial Sequence
  Description of Artificial Sequence: Synthetic oligonucleotide
ccttctacatcgaacgcc

SEQ ID NO: 7533 - DNA, 21 bp, Artificial Sequence
  Description of Artificial Sequence: Synthetic oligonucleotide
tcgttcgttcgagtttatacg

SEQ ID NO: 7534 - DNA, 21 bp, Artificial Sequence
  Description of Artificial Sequence: Synthetic oligonucleotide
gatcgttcggtgatagaattg

SEQ ID NO: 7535 - DNA, 25 bp, Artificial Sequence
  Description of Artificial Sequence: Synthetic oligonucleotide
gattcgagttggtagtaaaatcgtc

SEQ ID NO: 7536 - DNA, 18 bp, Artificial Sequence
  Description of Artificial Sequence: Synthetic oligonucleotide
tagtaaaatcgtcggggg

SEQ ID NO: 7537 - DNA, 25 bp, Artificial Sequence
  Description of Artificial Sequence: Synthetic oligonucleotide
tttatttagtgagtagcgaggtcgt

SEQ ID NO: 7538 - DNA, 23 bp, Artificial Sequence
  Description of Artificial Sequence: Synthetic oligonucleotide
ttagtgagtagcgaggtcgtttt

SEQ ID NO: 7539 - DNA, 23 bp, Artificial Sequence
  Description of Artificial Sequence: Synthetic oligonucleotide
aagatcgttcggtgatagaattg

SEQ ID NO: 7540 - DNA, 17 bp, Artificial Sequence
  Description of Artificial Sequence: Synthetic oligonucleotide
aaacaaccgcctcttcg

SEQ ID NO: 7541 - DNA, 26 bp, Artificial Sequence
  Description of Artificial Sequence: Synthetic oligonucleotide
gtttcgtttatttagtgagtagcgag

SEQ ID NO: 7542 - DNA, 18 bp, Artificial Sequence
  Description of Artificial Sequence: Synthetic oligonucleotide
aaaacgaaataaccccga

SEQ ID NO: 7543 - DNA, 21 bp, Artificial Sequence
  Description of Artificial Sequence: Synthetic oligonucleotide
aattctatcaccgaacgatct

SEQ ID NO: 7544 - DNA, 23 bp, Artificial Sequence
  Description of Artificial Sequence: Synthetic oligonucleotide
tttcgtttatttagtgagtagcg

SEQ ID NO: 7545 - DNA, 24 bp, Artificial Sequence
  Description of Artificial Sequence: Synthetic oligonucleotide
cataaacaattctatcaccgaacg

SEQ ID NO: 7546 - DNA, 24 bp, Artificial Sequence
  Description of Artificial Sequence: Synthetic oligonucleotide
gtttcgtttatttagtgagtagcg

SEQ ID NO: 7547 - DNA, 23 bp, Artificial Sequence
  Description of Artificial Sequence: Synthetic oligonucleotide
agtcgttcgttcgagtttatacg

SEQ ID NO: 7548 - DNA, 17 bp, Artificial Sequence
  Description of Artificial Sequence: Synthetic oligonucleotide
agtaaaatcgtcggggg

SEQ ID NO: 7549 - DNA, 20 bp, Artificial Sequence
  Description of Artificial Sequence: Synthetic oligonucleotide
aaacgaaataaccccgaaaa

SEQ ID NO: 7550 - DNA, 17 bp, Artificial Sequence
  Description of Artificial Sequence: Synthetic oligonucleotide
tcgaagaggcggttgtt

SEQ ID NO: 7551 - DNA, 30 bp, Artificial Sequence
  Description of Artificial Sequence: Synthetic oligonucleotide
attgaattcgtaagggagggggaagaacgt

SEQ ID NO: 7552 - DNA, 20 bp, Artificial Sequence
  Description of Artificial Sequence: Synthetic oligonucleotide
aaaacgaaataaccccgaaa

SEQ ID NO: 7553 - DNA, 30 bp, Artificial Sequence
  Description of Artificial Sequence: Synthetic oligonucleotide
ttgaattcgtaagggagggggaagaacgtt

SEQ ID NO: 7554 - DNA, 20 bp, Artificial Sequence
  Description of Artificial Sequence: Synthetic oligonucleotide
aaaaacgaaataaccccgaa

SEQ ID NO: 7555 - DNA, 22 bp, Artificial Sequence
  Description of Artificial Sequence: Synthetic oligonucleotide
tttttattagttcggttgtcgg

SEQ ID NO: 7556 - DNA, 22 bp, Artificial Sequence
  Description of Artificial Sequence: Synthetic oligonucleotide
cgcgcctatctcttattctcta

SEQ ID NO: 7557 - DNA, 32 bp, Artificial Sequence
  Description of Artificial Sequence: Synthetic oligonucleotide
ttaattttaaattgggcggggagtataggcgt

SEQ ID NO: 7558 - DNA, 22 bp, Artificial Sequence
  Description of Artificial Sequence: Synthetic oligonucleotide
gcgtttttattagttcggttgt

SEQ ID NO: 7559 - DNA, 22 bp, Artificial Sequence
  Description of Artificial Sequence: Synthetic oligonucleotide
ttttcgcgtttttattagttcg

SEQ ID NO: 7560 - DNA, 22 bp, Artificial Sequence
  Description of Artificial Sequence: Synthetic oligonucleotide
ggagtataggcgtcgtgtttag

SEQ ID NO: 7561 - DNA, 22 bp, Artificial Sequence
  Description of Artificial Sequence: Synthetic oligonucleotide
ctatatctttaactcgctcccg

SEQ ID NO: 7562 - DNA, 33 bp, Artificial Sequence
  Description of Artificial Sequence: Synthetic oligonucleotide
gaggcggggaggagtagttaggtagcgacgcga

SEQ ID NO: 7563 - DNA, 23 bp, Artificial Sequence
  Description of Artificial Sequence: Synthetic oligonucleotide
actatatctttaactcgctcccg

SEQ ID NO: 7564 - DNA, 33 bp, Artificial Sequence
  Description of Artificial Sequence: Synthetic oligonucleotide
aggcggggaggagtagttaggtagcgacgcgag

SEQ ID NO: 7565 - DNA, 21 bp, Artificial Sequence
  Description of Artificial Sequence: Synthetic oligonucleotide
cgcgttgggtagttttatttt

SEQ ID NO: 7566 - DNA, 21 bp, Artificial Sequence
  Description of Artificial Sequence: Synthetic oligonucleotide
cgcgtttttattagttcggtt

SEQ ID NO: 7567 - DNA, 21 bp, Artificial Sequence
  Description of Artificial Sequence: Synthetic oligonucleotide
tttcgcgtttttattagttcg

SEQ ID NO: 7568 - DNA, 22 bp, Artificial Sequence
  Description of Artificial Sequence: Synthetic oligonucleotide
tatatctttaactcgctcccgc

SEQ ID NO: 7569 - DNA, 25 bp, Artificial Sequence
  Description of Artificial Sequence: Synthetic oligonucleotide
ataagagataggcgcgggaggcggg

SEQ ID NO: 7570 - DNA, 21 bp, Artificial Sequence
  Description of Artificial Sequence: Synthetic oligonucleotide
tcgcgtttttattagttcggt

SEQ ID NO: 7571 - DNA, 22 bp, Artificial Sequence
  Description of Artificial Sequence: Synthetic oligonucleotide
tataggcgtcgtgtttagagaa

SEQ ID NO: 7572 - DNA, 38 bp, Artificial Sequence
  Description of Artificial Sequence: Synthetic oligonucleotide
taggcgtcgtgtttagagaataagagataggcgcggga

SEQ ID NO: 7573 - DNA, 21 bp, Artificial Sequence
  Description of Artificial Sequence: Synthetic oligonucleotide
tttattagttcggttgtcggg

SEQ ID NO: 7574 - DNA, 23 bp, Artificial Sequence
  Description of Artificial Sequence: Synthetic oligonucleotide
gtttttattagttcggttgtcgg

SEQ ID NO: 7575 - DNA, 21 bp, Artificial Sequence
  Description of Artificial Sequence: Synthetic oligonucleotide
ttttattagttcggttgtcgg

SEQ ID NO: 7576 - DNA, 22 bp, Artificial Sequence
  Description of Artificial Sequence: Synthetic oligonucleotide
cgtttttattagttcggttgtc

SEQ ID NO: 7577 - DNA, 21 bp, Artificial Sequence
  Description of Artificial Sequence: Synthetic oligonucleotide
ttcgcgtttttattagttcgg

SEQ ID NO: 7578 - DNA, 23 bp, Artificial Sequence
  Description of Artificial Sequence: Synthetic oligonucleotide
gagtataggcgtcgtgtttagag

SEQ ID NO: 7579 - DNA, 21 bp, Artificial Sequence
  Description of Artificial Sequence: Synthetic oligonucleotide
tcggttgtcggggtatagtta

SEQ ID NO: 7580 - DNA, 20 bp, Artificial Sequence
  Description of Artificial Sequence: Synthetic oligonucleotide
ttattagttcggttgtcggg

SEQ ID NO: 7581 - DNA, 23 bp, Artificial Sequence
  Description of Artificial Sequence: Synthetic oligonucleotide
gtataggcgtcgtgtttagagaa

SEQ ID NO: 7582 - DNA, 20 bp, Artificial Sequence
  Description of Artificial Sequence: Synthetic oligonucleotide
cggttgtcggggtatagtta

SEQ ID NO: 7583 - DNA, 21 bp, Artificial Sequence
  Description of Artificial Sequence: Synthetic oligonucleotide
atatctttaactcgctcccgc

SEQ ID NO: 7584 - DNA, 20 bp, Artificial Sequence
  Description of Artificial Sequence: Synthetic oligonucleotide
ccgcgcctatctcttattct

SEQ ID NO: 7585 - DNA, 21 bp, Artificial Sequence
  Description of Artificial Sequence: Synthetic oligonucleotide
ataggcgtcgtgtttagagaa

SEQ ID NO: 7586 - DNA, 22 bp, Artificial Sequence
  Description of Artificial Sequence: Synthetic oligonucleotide
agtataggcgtcgtgtttagag

SEQ ID NO: 7587 - DNA, 20 bp, Artificial Sequence
  Description of Artificial Sequence: Synthetic oligonucleotide
gcgcgttgggtagttttatt

SEQ ID NO: 7588 - DNA, 20 bp, Artificial Sequence
  Description of Artificial Sequence: Synthetic oligonucleotide
tagttcggttgtcggggtat

SEQ ID NO: 7589 - DNA, 20 bp, Artificial Sequence
  Description of Artificial Sequence: Synthetic oligonucleotide
ttcggttgtcggggtatagt

SEQ ID NO: 7590 - DNA, 19 bp, Artificial Sequence
  Description of Artificial Sequence: Synthetic oligonucleotide
tagtttcggtttttcgcgt

SEQ ID NO: 7591 - DNA, 22 bp, Artificial Sequence
  Description of Artificial Sequence: Synthetic oligonucleotide
ctaaacacgacgcctatactcc

SEQ ID NO: 7592 - DNA, 30 bp, Artificial Sequence
  Description of Artificial Sequence: Synthetic oligonucleotide
ttgtcggggtatagttatagtttcgcgcgt

SEQ ID NO: 7593 - DNA, 20 bp, Artificial Sequence
  Description of Artificial Sequence: Synthetic oligonucleotide
tatctttaactcgctcccgc

SEQ ID NO: 7594 - DNA, 22 bp, Artificial Sequence
  Description of Artificial Sequence: Synthetic oligonucleotide
ttattctctaaacacgacgcct

SEQ ID NO: 7595 - DNA, 20 bp, Artificial Sequence
  Description of Artificial Sequence: Synthetic oligonucleotide
aacacgacgcctatactccc

SEQ ID NO: 7596 - DNA, 20 bp, Artificial Sequence
  Description of Artificial Sequence: Synthetic oligonucleotide
ttagtttcggtttttcgcgt

SEQ ID NO: 7597 - DNA, 20 bp, Artificial Sequence
  Description of Artificial Sequence: Synthetic oligonucleotide
gggagtataggcgtcgtgtt

SEQ ID NO: 7598 - DNA, 20 bp, Artificial Sequence
  Description of Artificial Sequence: Synthetic oligonucleotide
tattagttcggttgtcgggg

SEQ ID NO: 7599 - DNA, 19 bp, Artificial Sequence
  Description of Artificial Sequence: Synthetic oligonucleotide
acacgacgcctatactccc

SEQ ID NO: 7600 - DNA, 20 bp, Artificial Sequence
  Description of Artificial Sequence: Synthetic oligonucleotide
gtacggtttacggcggatag

SEQ ID NO: 7601 - DNA, 22 bp, Artificial Sequence
  Description of Artificial Sequence: Synthetic oligonucleotide
cgaactaataaaaacgcgaaaa

SEQ ID NO: 7602 - DNA, 22 bp, Artificial Sequence
  Description of Artificial Sequence: Synthetic oligonucleotide
agcgtgacggtgtttgcggggt

SEQ ID NO: 7603 - DNA, 22 bp, Artificial Sequence
  Description of Artificial Sequence: Synthetic oligonucleotide
gggttagtcgagttttagtcgc

SEQ ID NO: 7604 - DNA, 21 bp, Artificial Sequence
  Description of Artificial Sequence: Synthetic oligonucleotide
atacgaatatacaccgccacg

SEQ ID NO: 7605 - DNA, 31 bp, Artificial Sequence
  Description of Artificial Sequence: Synthetic oligonucleotide
gtcgggcgtttgttgtttaaaattcgcgcgt

SEQ ID NO: 7606 - DNA, 19 bp, Artificial Sequence
  Description of Artificial Sequence: Synthetic oligonucleotide
tacggtttacggcggatag

SEQ ID NO: 7607 - DNA, 22 bp, Artificial Sequence
  Description of Artificial Sequence: Synthetic oligonucleotide
acaaccgaactaataaaaacgc

SEQ ID NO: 7608 - DNA, 18 bp, Artificial Sequence
  Description of Artificial Sequence: Synthetic oligonucleotide
ctttaactcgctcccgct

SEQ ID NO: 7609 - DNA, 18 bp, Artificial Sequence
  Description of Artificial Sequence: Synthetic oligonucleotide
gttcggttgtcggggtat

SEQ ID NO: 7610 - DNA, 18 bp, Artificial Sequence
  Description of Artificial Sequence: Synthetic oligonucleotide
atcgcgggtaggaagaaa

SEQ ID NO: 7611 - DNA, 22 bp, Artificial Sequence
  Description of Artificial Sequence: Synthetic oligonucleotide
cgctatccaaactacgaaaaac

SEQ ID NO: 7612 - DNA, 30 bp, Artificial Sequence
  Description of Artificial Sequence: Synthetic oligonucleotide
agcgggttgcgcgggtttcgaggcgtcgta

SEQ ID NO: 7613 - DNA, 22 bp, Artificial Sequence
  Description of Artificial Sequence: Synthetic oligonucleotide
ctatccaaactacgaaaaacgc

SEQ ID NO: 7614 - DNA, 22 bp, Artificial Sequence
  Description of Artificial Sequence: Synthetic oligonucleotide
gctatccaaactacgaaaaacg

SEQ ID NO: 7615 - DNA, 19 bp, Artificial Sequence
  Description of Artificial Sequence: Synthetic oligonucleotide
agttcggttgtcggggtat

SEQ ID NO: 7616 - DNA, 22 bp, Artificial Sequence
  Description of Artificial Sequence: Synthetic oligonucleotide
attctctaaacacgacgcctat

SEQ ID NO: 7617 - DNA, 18 bp, Artificial Sequence
  Description of Artificial Sequence: Synthetic oligonucleotide
cccgcgcctatctcttat

SEQ ID NO: 7618 - DNA, 18 bp, Artificial Sequence
  Description of Artificial Sequence: Synthetic oligonucleotide
agtttcggtttttcgcgt

SEQ ID NO: 7619 - DNA, 19 bp, Artificial Sequence
  Description of Artificial Sequence: Synthetic oligonucleotide
atctttaactcgctcccgc

SEQ ID NO: 7620 - DNA, 20 bp, Artificial Sequence
  Description of Artificial Sequence: Synthetic oligonucleotide
taggcgtcgtgtttagagaa

SEQ ID NO: 7621 - DNA, 19 bp, Artificial Sequence
  Description of Artificial Sequence: Synthetic oligonucleotide
ggtttacggcggatagaat

SEQ ID NO: 7622 - DNA, 22 bp, Artificial Sequence
  Description of Artificial Sequence: Synthetic oligonucleotide
ccgacaaccgaactaataaaaa

SEQ ID NO: 7623 - DNA, 22 bp, Artificial Sequence
  Description of Artificial Sequence: Synthetic oligonucleotide
agtttgttgttattttcgcgtt

SEQ ID NO: 7624 - DNA, 18 bp, Artificial Sequence
  Description of Artificial Sequence: Synthetic oligonucleotide
acaaaatctccgcgctct

SEQ ID NO: 7625 - DNA, 39 bp, Artificial Sequence
  Description of Artificial Sequence: Synthetic oligonucleotide
gggagtttgtatgtttgtttagatcgatttattatcggt

SEQ ID NO: 7626 - DNA, 23 bp, Artificial Sequence
  Description of Artificial Sequence: Synthetic oligonucleotide
ttctctaaacacgacgcctatac

SEQ ID NO: 7627 - DNA, 18 bp, Artificial Sequence
  Description of Artificial Sequence: Synthetic oligonucleotide
gatcgcgggtaggaagaa

SEQ ID NO: 7628 - DNA, 20 bp, Artificial Sequence
  Description of Artificial Sequence: Synthetic oligonucleotide
tacgaatatacaccgccacg

SEQ ID NO: 7629 - DNA, 19 bp, Artificial Sequence
  Description of Artificial Sequence: Synthetic oligonucleotide
attagttcggttgtcgggg

SEQ ID NO: 7630 - DNA, 30 bp, Artificial Sequence
  Description of Artificial Sequence: Synthetic oligonucleotide
gtcggggtatagttatagtttcgcgcgttg

SEQ ID NO: 7631 - DNA, 19 bp, Artificial Sequence
  Description of Artificial Sequence: Synthetic oligonucleotide
cgctctttcttcctacccg

SEQ ID NO: 7632 - DNA, 24 bp, Artificial Sequence
  Description of Artificial Sequence: Synthetic oligonucleotide
gttaggtagcgacgcgagcgggag

SEQ ID NO: 7633 - DNA, 18 bp, Artificial Sequence
  Description of Artificial Sequence: Synthetic oligonucleotide
cgcgggtaggaagaaaga

SEQ ID NO: 7634 - DNA, 29 bp, Artificial Sequence
  Description of Artificial Sequence: Synthetic oligonucleotide
aacgcgtcgtttcgcgaagttatattcgt

SEQ ID NO: 7635 - DNA, 18 bp, Artificial Sequence
  Description of Artificial Sequence: Synthetic oligonucleotide
tcgcgggtaggaagaaag

SEQ ID NO: 7636 - DNA, 19 bp, Artificial Sequence
  Description of Artificial Sequence: Synthetic oligonucleotide
cgggtaggaagaaagagcg

SEQ ID NO: 7637 - DNA, 18 bp, Artificial Sequence
  Description of Artificial Sequence: Synthetic oligonucleotide
acgacgcctatactcccc

SEQ ID NO: 7638 - DNA, 19 bp, Artificial Sequence
  Description of Artificial Sequence: Synthetic oligonucleotide
tcccgcgcctatctcttat

SEQ ID NO: 7639 - DNA, 22 bp, Artificial Sequence
  Description of Artificial Sequence: Synthetic oligonucleotide
tcgaaacgaccaatacctataa

SEQ ID NO: 7640 - DNA, 23 bp, Artificial Sequence
  Description of Artificial Sequence: Synthetic oligonucleotide
ctcgaaacgaccaatacctataa

SEQ ID NO: 7641 - DNA, 23 bp, Artificial Sequence
  Description of Artificial Sequence: Synthetic oligonucleotide
tctctaaacacgacgcctatact

SEQ ID NO: 7642 - DNA, 23 bp, Artificial Sequence
  Description of Artificial Sequence: Synthetic oligonucleotide
ctctaaacacgacgcctatactc

SEQ ID NO: 7643 - DNA, 18 bp, Artificial Sequence
  Description of Artificial Sequence: Synthetic oligonucleotide
acggtttacggcggatag

SEQ ID NO: 7644 - DNA, 18 bp, Artificial Sequence
  Description of Artificial Sequence: Synthetic oligonucleotide
tttaactcgctcccgctc

SEQ ID NO: 7645 - DNA, 18 bp, Artificial Sequence
  Description of Artificial Sequence: Synthetic oligonucleotide
tctttaactcgctcccgc

SEQ ID NO: 7646 - DNA, 22 bp, Artificial Sequence
  Description of Artificial Sequence: Synthetic oligonucleotide
tctaaacacgacgcctatactc

SEQ ID NO: 7647 - DNA, 18 bp, Artificial Sequence
  Description of Artificial Sequence: Synthetic oligonucleotide
ggggagtataggcgtcgt

SEQ ID NO: 7648 - DNA, 26 bp, Artificial Sequence
  Description of Artificial Sequence: Synthetic oligonucleotide
gagtagttaggtagcgacgcgagcgg

SEQ ID NO: 7649 - DNA, 22 bp, Artificial Sequence
  Description of Artificial Sequence: Synthetic oligonucleotide
tcgctatccaaactacgaaaaa

SEQ ID NO: 7650 - DNA, 23 bp, Artificial Sequence
  Description of Artificial Sequence: Synthetic oligonucleotide
tattctctaaacacgacgcctat

SEQ ID NO: 7651 - DNA, 17 bp, Artificial Sequence
  Description of Artificial Sequence: Synthetic oligonucleotide
ttcggtttttcgcgttt

SEQ ID NO: 7652 - DNA, 21 bp, Artificial Sequence
  Description of Artificial Sequence: Synthetic oligonucleotide
accgaactaataaaaacgcga

SEQ ID NO: 7653 - DNA, 30 bp, Artificial Sequence
  Description of Artificial Sequence: Synthetic oligonucleotide
tgtcggggtatagttatagtttcgcgcgtt

SEQ ID NO: 7654 - DNA, 18 bp, Artificial Sequence
  Description of Artificial Sequence: Synthetic oligonucleotide
atatacaccgccacgcac

SEQ ID NO: 7655 - DNA, 21 bp, Artificial Sequence
  Description of Artificial Sequence: Synthetic oligonucleotide
tataggcgtcgtgtttagaga

SEQ ID NO: 7656 - DNA, 17 bp, Artificial Sequence
  Description of Artificial Sequence: Synthetic oligonucleotide
ttaactcgctcccgctc

SEQ ID NO: 7657 - DNA, 21 bp, Artificial Sequence
  Description of Artificial Sequence: Synthetic oligonucleotide
taaacacgacgcctatactcc

SEQ ID NO: 7658 - DNA, 23 bp, Artificial Sequence
  Description of Artificial Sequence: Synthetic oligonucleotide
cttattctctaaacacgacgcct

SEQ ID NO: 7659 - DNA, 17 bp, Artificial Sequence
  Description of Artificial Sequence: Synthetic oligonucleotide
caaaatctccgcgctct

SEQ ID NO: 7660 - DNA, 20 bp, Artificial Sequence
  Description of Artificial Sequence: Synthetic oligonucleotide
ccgaactaataaaaacgcga

SEQ ID NO: 7661 - DNA, 18 bp, Artificial Sequence
  Description of Artificial Sequence: Synthetic oligonucleotide
ttagttcggttgtcgggg

SEQ ID NO: 7662 - DNA, 23 bp, Artificial Sequence
  Description of Artificial Sequence: Synthetic oligonucleotide
tcgaaacgaccaatacctataaa

SEQ ID NO: 7663 - DNA, 22 bp, Artificial Sequence
  Description of Artificial Sequence: Synthetic oligonucleotide
ctcgctatccaaactacgaaaa

SEQ ID NO: 7664 - DNA, 25 bp, Artificial Sequence
  Description of Artificial Sequence: Synthetic oligonucleotide
gtagttaggtagcgacgcgagcggg

SEQ ID NO: 7665 - DNA, 23 bp, Artificial Sequence
  Description of Artificial Sequence: Synthetic oligonucleotide
ctcttattctctaaacacgacgc

SEQ ID NO: 7666 - DNA, 19 bp, Artificial Sequence
  Description of Artificial Sequence: Synthetic oligonucleotide
agcgcggagattttgttta

SEQ ID NO: 7667 - DNA, 21 bp, Artificial Sequence
  Description of Artificial Sequence: Synthetic oligonucleotide
gctcgaaacgaccaataccta

SEQ ID NO: 7668 - DNA, 25 bp, Artificial Sequence
  Description of Artificial Sequence: Synthetic oligonucleotide
ttcggttcgtacggtttacggcgga

SEQ ID NO: 7669 - DNA, 19 bp, Artificial Sequence
  Description of Artificial Sequence: Synthetic oligonucleotide
acgaatatacaccgccacg

SEQ ID NO: 7670 - DNA, 19 bp, Artificial Sequence
  Description of Artificial Sequence: Synthetic oligonucleotide
aatatacaccgccacgcac

SEQ ID NO: 7671 - DNA, 23 bp, Artificial Sequence
  Description of Artificial Sequence: Synthetic oligonucleotide
gacaaccgaactaataaaaacgc

SEQ ID NO: 7672 - DNA, 22 bp, Artificial Sequence
  Description of Artificial Sequence: Synthetic oligonucleotide
gagtttgttgttattttcgcgt

SEQ ID NO: 7673 - DNA, 18 bp, Artificial Sequence
  Description of Artificial Sequence: Synthetic oligonucleotide
gaatatacaccgccacgc

SEQ ID NO: 7674 - DNA, 22 bp, Artificial Sequence
  Description of Artificial Sequence: Synthetic oligonucleotide
ataggcgtcgtgtttagagaat

SEQ ID NO: 7675 - DNA, 18 bp, Artificial Sequence
  Description of Artificial Sequence: Synthetic oligonucleotide
cgaatatacaccgccacg

SEQ ID NO: 7676 - DNA, 17 bp, Artificial Sequence
  Description of Artificial Sequence: Synthetic oligonucleotide
cggtttacggcggatag

SEQ ID NO: 7677 - DNA, 20 bp, Artificial Sequence
  Description of Artificial Sequence: Synthetic oligonucleotide
gttcggttgtcggggtatag

SEQ ID NO: 7678 - DNA, 18 bp, Artificial Sequence
  Description of Artificial Sequence: Synthetic oligonucleotide
tttcttcctacccgcgat

SEQ ID NO: 7679 - DNA, 22 bp, Artificial Sequence
  Description of Artificial Sequence: Synthetic oligonucleotide
cgacaaccgaactaataaaaac

SEQ ID NO: 7680 - DNA, 19 bp, Artificial Sequence
  Description of Artificial Sequence: Synthetic oligonucleotide
ctttcttcctacccgcgat

SEQ ID NO: 7681 - DNA, 18 bp, Artificial Sequence
  Description of Artificial Sequence: Synthetic oligonucleotide
cacgacgcctatactccc

SEQ ID NO: 7682 - DNA, 18 bp, Artificial Sequence
  Description of Artificial Sequence: Synthetic oligonucleotide
agcgcggagattttgttt

SEQ ID NO: 7683 - DNA, 19 bp, Artificial Sequence
  Description of Artificial Sequence: Synthetic oligonucleotide
cgcggagattttgtttagg

SEQ ID NO: 7684 - DNA, 21 bp, Artificial Sequence
  Description of Artificial Sequence: Synthetic oligonucleotide
atacgctcgaaacgaccaata

SEQ ID NO: 7685 - DNA, 20 bp, Artificial Sequence
  Description of Artificial Sequence: Synthetic oligonucleotide
cgcgtttttattagttcggt

SEQ ID NO: 7686 - DNA, 21 bp, Artificial Sequence
  Description of Artificial Sequence: Synthetic oligonucleotide
caaccgaactaataaaaacgc

SEQ ID NO: 7687 - DNA, 18 bp, Artificial Sequence
  Description of Artificial Sequence: Synthetic oligonucleotide
agagcgcggagattttgt

SEQ ID NO: 7688 - DNA, 20 bp, Artificial Sequence
  Description of Artificial Sequence: Synthetic oligonucleotide
aaacacgacgcctatactcc

SEQ ID NO: 7689 - DNA, 20 bp, Artificial Sequence
  Description of Artificial Sequence: Synthetic oligonucleotide
agcgcggagattttgtttag

SEQ ID NO: 7690 - DNA, 22 bp, Artificial Sequence
  Description of Artificial Sequence: Synthetic oligonucleotide
taggcgtcgtgtttagagaata

SEQ ID NO: 7691 - DNA, 22 bp, Artificial Sequence
  Description of Artificial Sequence: Synthetic oligonucleotide
tctaaaccgatctatcaccgac

SEQ ID NO: 7692 - DNA, 21 bp, Artificial Sequence
  Description of Artificial Sequence: Synthetic oligonucleotide
gttacgtttttcgggttttgt

SEQ ID NO: 7693 - DNA, 35 bp, Artificial Sequence
  Description of Artificial Sequence: Synthetic oligonucleotide
tgcgggtcgggggatttgggtagggttttcgcgtt

SEQ ID NO: 7694 - DNA, 22 bp, Artificial Sequence
  Description of Artificial Sequence: Synthetic oligonucleotide
atctaaaccgatctatcaccga

SEQ ID NO: 7695 - DNA, 21 bp, Artificial Sequence
  Description of Artificial Sequence: Synthetic oligonucleotide
tatcgttacgtttttcgggtt

SEQ ID NO: 7696 - DNA, 24 bp, Artificial Sequence
  Description of Artificial Sequence: Synthetic oligonucleotide
ttcgtcgtgaatcgtgcgggtcgg

SEQ ID NO: 7697 - DNA, 21 bp, Artificial Sequence
  Description of Artificial Sequence: Synthetic oligonucleotide
ttacgtttttcgggttttgtt

SEQ ID NO: 7698 - DNA, 22 bp, Artificial Sequence
  Description of Artificial Sequence: Synthetic oligonucleotide
tatcgttacgtttttcgggttt

SEQ ID NO: 7699 - DNA, 22 bp, Artificial Sequence
  Description of Artificial Sequence: Synthetic oligonucleotide
taaaccgatctatcaccgacac

SEQ ID NO: 7700 - DNA, 21 bp, Artificial Sequence
  Description of Artificial Sequence: Synthetic oligonucleotide
tacgtttttcgggttttgttc

SEQ ID NO: 7701 - DNA, 23 bp, Artificial Sequence
  Description of Artificial Sequence: Synthetic oligonucleotide
tatctaaaccgatctatcaccga

SEQ ID NO: 7702 - DNA, 22 bp, Artificial Sequence
  Description of Artificial Sequence: Synthetic oligonucleotide
ctaaaccgatctatcaccgaca

SEQ ID NO: 7703 - DNA, 22 bp, Artificial Sequence
  Description of Artificial Sequence: Synthetic oligonucleotide
gttacgtttttcgggttttgtt

SEQ ID NO: 7704 - DNA, 20 bp, Artificial Sequence
  Description of Artificial Sequence: Synthetic oligonucleotide
ccgaaaactaactcgctcac

SEQ ID NO: 7705 - DNA, 22 bp, Artificial Sequence
  Description of Artificial Sequence: Synthetic oligonucleotide
gtcggtgatagatcggtttaga

SEQ ID NO: 7706 - DNA, 21 bp, Artificial Sequence
  Description of Artificial Sequence: Synthetic oligonucleotide
ggggggaggcgcggagatggt

SEQ ID NO: 7707 - DNA, 20 bp, Artificial Sequence
  Description of Artificial Sequence: Synthetic oligonucleotide
aaacccgaaaactaactcgc

SEQ ID NO: 7708 - DNA, 20 bp, Artificial Sequence
  Description of Artificial Sequence: Synthetic oligonucleotide
atcgttacgtttttcgggtt

SEQ ID NO: 7709 - DNA, 21 bp, Artificial Sequence
  Description of Artificial Sequence: Synthetic oligonucleotide
actaactcgctcactcgcaac

SEQ ID NO: 7710 - DNA, 22 bp, Artificial Sequence
  Description of Artificial Sequence: Synthetic oligonucleotide
tcggtgatagatcggtttagat

SEQ ID NO: 7711 - DNA, 21 bp, Artificial Sequence
  Description of Artificial Sequence: Synthetic oligonucleotide
aaaccgatctatcaccgacac

SEQ ID NO: 7712 - DNA, 20 bp, Artificial Sequence
  Description of Artificial Sequence: Synthetic oligonucleotide
taactcgctcactcgcaact

SEQ ID NO: 7713 - DNA, 20 bp, Artificial Sequence
  Description of Artificial Sequence: Synthetic oligonucleotide
actaactcgctcactcgcaa

SEQ ID NO: 7714 - DNA, 23 bp, Artificial Sequence
  Description of Artificial Sequence: Synthetic oligonucleotide
ctatctaaaccgatctatcaccg

SEQ ID NO: 7715 - DNA, 21 bp, Artificial Sequence
  Description of Artificial Sequence: Synthetic oligonucleotide
atcgttacgtttttcgggttt

SEQ ID NO: 7716 - DNA, 21 bp, Artificial Sequence
  Description of Artificial Sequence: Synthetic oligonucleotide
ctaactcgctcactcgcaact

SEQ ID NO: 7717 - DNA, 20 bp, Artificial Sequence
  Description of Artificial Sequence: Synthetic oligonucleotide
tacgtttttcgggttttgtt

SEQ ID NO: 7718 - DNA, 20 bp, Artificial Sequence
  Description of Artificial Sequence: Synthetic oligonucleotide
ctaactcgctcactcgcaac

SEQ ID NO: 7719 - DNA, 20 bp, Artificial Sequence
  Description of Artificial Sequence: Synthetic oligonucleotide
acgtttttcgggttttgttc

SEQ ID NO: 7720 - DNA, 22 bp, Artificial Sequence
  Description of Artificial Sequence: Synthetic oligonucleotide
taaacccgaaaactaactcgct

SEQ ID NO: 7721 - DNA, 21 bp, Artificial Sequence
  Description of Artificial Sequence: Synthetic oligonucleotide
gtgtcggtgatagatcggttt

SEQ ID NO: 7722 - DNA, 19 bp, Artificial Sequence
  Description of Artificial Sequence: Synthetic oligonucleotide
tcgttacgtttttcgggtt

SEQ ID NO: 7723 - DNA, 20 bp, Artificial Sequence
  Description of Artificial Sequence: Synthetic oligonucleotide
tgtcggtgatagatcggttt

SEQ ID NO: 7724 - DNA, 19 bp, Artificial Sequence
  Description of Artificial Sequence: Synthetic oligonucleotide
cgttacgtttttcgggttt

SEQ ID NO: 7725 - DNA, 23 bp, Artificial Sequence
  Description of Artificial Sequence: Synthetic oligonucleotide
tcggtgatagatcggtttagata

SEQ ID NO: 7726 - DNA, 21 bp, Artificial Sequence
  Description of Artificial Sequence: Synthetic oligonucleotide
ccgaaaactaactcgctcact

SEQ ID NO: 7727 - DNA, 23 bp, Artificial Sequence
  Description of Artificial Sequence: Synthetic oligonucleotide
cggtgatagatcggtttagatag

SEQ ID NO: 7728 - DNA, 20 bp, Artificial Sequence
  Description of Artificial Sequence: Synthetic oligonucleotide
aaccgatctatcaccgacac

SEQ ID NO: 7729 - DNA, 21 bp, Artificial Sequence
  Description of Artificial Sequence: Synthetic oligonucleotide
actcgctaaacccgaaaacta

SEQ ID NO: 7730 - DNA, 20 bp, Artificial Sequence
  Description of Artificial Sequence: Synthetic oligonucleotide
gtgtcggtgatagatcggtt

SEQ ID NO: 7731 - DNA, 20 bp, Artificial Sequence
  Description of Artificial Sequence: Synthetic oligonucleotide
tcgttacgtttttcgggttt

SEQ ID NO: 7732 - DNA, 19 bp, Artificial Sequence
  Description of Artificial Sequence: Synthetic oligonucleotide
ttttcgggttttgttcgtc

SEQ ID NO: 7733 - DNA, 22 bp, Artificial Sequence
  Description of Artificial Sequence: Synthetic oligonucleotide
cgctaaacccgaaaactaactc

SEQ ID NO: 7734 - DNA, 22 bp, Artificial Sequence
  Description of Artificial Sequence: Synthetic oligonucleotide
ctaaacccgaaaactaactcgc

SEQ ID NO: 7735 - DNA, 22 bp, Artificial Sequence
  Description of Artificial Sequence: Synthetic oligonucleotide
aactcgctaaacccgaaaacta

SEQ ID NO: 7736 - DNA, 20 bp, Artificial Sequence
  Description of Artificial Sequence: Synthetic oligonucleotide
aacccgaaaactaactcgct

SEQ ID NO: 7737 - DNA, 22 bp, Artificial Sequence
  Description of Artificial Sequence: Synthetic oligonucleotide
tgtcggtgatagatcggtttag

SEQ ID NO: 7738 - DNA, 21 bp, Artificial Sequence
  Description of Artificial Sequence: Synthetic oligonucleotide
accgatctatcaccgacacac

SEQ ID NO: 7739 - DNA, 21 bp, Artificial Sequence
  Description of Artificial Sequence: Synthetic oligonucleotide
gtgtgtcggtgatagatcggt

SEQ ID NO: 7740 - DNA, 19 bp, Artificial Sequence
  Description of Artificial Sequence: Synthetic oligonucleotide
aactcgctcactcgcaact

SEQ ID NO: 7741 - DNA, 20 bp, Artificial Sequence
  Description of Artificial Sequence: Synthetic oligonucleotide
ccgatctatcaccgacacac

SEQ ID NO: 7742 - DNA, 20 bp, Artificial Sequence
  Description of Artificial Sequence: Synthetic oligonucleotide
tgtgtcggtgatagatcggt

SEQ ID NO: 7743 - DNA, 20 bp, Artificial Sequence
  Description of Artificial Sequence: Synthetic oligonucleotide
ggtgtgtcggtgatagatcg

SEQ ID NO: 7744 - DNA, 21 bp, Artificial Sequence
  Description of Artificial Sequence: Synthetic oligonucleotide
ctcgctaaacccgaaaactaa

SEQ ID NO: 7745 - DNA, 19 bp, Artificial Sequence
  Description of Artificial Sequence: Synthetic oligonucleotide
acgtttttcgggttttgtt

SEQ ID NO: 7746 - DNA, 21 bp, Artificial Sequence
  Description of Artificial Sequence: Synthetic oligonucleotide
cgctaaacccgaaaactaact

SEQ ID NO: 7747 - DNA, 22 bp, Artificial Sequence
  Description of Artificial Sequence: Synthetic oligonucleotide
ctcgctaaacccgaaaactaac

SEQ ID NO: 7748 - DNA, 22 bp, Artificial Sequence
  Description of Artificial Sequence: Synthetic oligonucleotide
tcgctaaacccgaaaactaact

SEQ ID NO: 7749 - DNA, 22 bp, Artificial Sequence
  Description of Artificial Sequence: Synthetic oligonucleotide
gctaaacccgaaaactaactcg

SEQ ID NO: 7750 - DNA, 21 bp, Artificial Sequence
  Description of Artificial Sequence: Synthetic oligonucleotide
aaacccgaaaactaactcgct

SEQ ID NO: 7751 - DNA, 19 bp, Artificial Sequence
  Description of Artificial Sequence: Synthetic oligonucleotide
aacccgaaaactaactcgc

SEQ ID NO: 7752 - DNA, 20 bp, Artificial Sequence
  Description of Artificial Sequence: Synthetic oligonucleotide
cgatctatcaccgacacacc

SEQ ID NO: 7753 - DNA, 19 bp, Artificial Sequence
  Description of Artificial Sequence: Synthetic oligonucleotide
actcgctcactcgcaactc

SEQ ID NO: 7754 - DNA, 18 bp, Artificial Sequence
  Description of Artificial Sequence: Synthetic oligonucleotide
ctcgctcactcgcaactc

SEQ ID NO: 7755 - DNA, 20 bp, Artificial Sequence
  Description of Artificial Sequence: Synthetic oligonucleotide
accgatctatcaccgacaca

SEQ ID NO: 7756 - DNA, 19 bp, Artificial Sequence
  Description of Artificial Sequence: Synthetic oligonucleotide
ccgatctatcaccgacaca

SEQ ID NO: 7757 - DNA, 24 bp, Artificial Sequence
  Description of Artificial Sequence: Synthetic oligonucleotide
tcggtgatagatcggtttagatag

SEQ ID NO: 7758 - DNA, 21 bp, Artificial Sequence
  Description of Artificial Sequence: Synthetic oligonucleotide
aaaactaactcgctcactcgc

SEQ ID NO: 7759 - DNA, 20 bp, Artificial Sequence
  Description of Artificial Sequence: Synthetic oligonucleotide
gtgtgtcggtgatagatcgg

SEQ ID NO: 7760 - DNA, 19 bp, Artificial Sequence
  Description of Artificial Sequence: Synthetic oligonucleotide
tgtgtcggtgatagatcgg

SEQ ID NO: 7761 - DNA, 22 bp, Artificial Sequence
  Description of Artificial Sequence: Synthetic oligonucleotide
aaaaacgtgagttcgtttaggt

SEQ ID NO: 7762 - DNA, 22 bp, Artificial Sequence
  Description of Artificial Sequence: Synthetic oligonucleotide
ttcttaactacaaccgctcgat

SEQ ID NO: 7763 - DNA, 41 bp, Artificial Sequence
  Description of Artificial Sequence: Synthetic oligonucleotide
ttacgtaggtgggtaattggtttaaaaatcgtcgataaagg

SEQ ID NO: 7764 - DNA, 23 bp, Artificial Sequence
  Description of Artificial Sequence: Synthetic oligonucleotide
ttgtcgttttgtcgagtaatttt

SEQ ID NO: 7765 - DNA, 22 bp, Artificial Sequence
  Description of Artificial Sequence: Synthetic oligonucleotide
acgaatcacaactcgtaacaca

SEQ ID NO: 7766 - DNA, 37 bp, Artificial Sequence
  Description of Artificial Sequence: Synthetic oligonucleotide
ttcggaagaatttttagtcgtcgggttggagggacgt

SEQ ID NO: 7767 - DNA, 22 bp, Artificial Sequence
  Description of Artificial Sequence: Synthetic oligonucleotide
acacgaatcacaactcgtaaca

SEQ ID NO: 7768 - DNA, 22 bp, Artificial Sequence
  Description of Artificial Sequence: Synthetic oligonucleotide
aaaacgcgaaaacctctaaata

SEQ ID NO: 7769 - DNA, 32 bp, Artificial Sequence
  Description of Artificial Sequence: Synthetic oligonucleotide
aagggatcgagcggttgtagttaagaataggt

SEQ ID NO: 7770 - DNA, 22 bp, Artificial Sequence
  Description of Artificial Sequence: Synthetic oligonucleotide
tgtcgttttgtcgagtaatttt

SEQ ID NO: 7771 - DNA, 22 bp, Artificial Sequence
  Description of Artificial Sequence: Synthetic oligonucleotide
gcgaaaacctctaaataccgac

SEQ ID NO: 7772 - DNA, 37 bp, Artificial Sequence
  Description of Artificial Sequence: Synthetic oligonucleotide
gggtaattggtttaaaaatcgtcgataaagggatcga

SEQ ID NO: 7773 - DNA, 22 bp, Artificial Sequence
  Description of Artificial Sequence: Synthetic oligonucleotide
aaacgcgaaaacctctaaatac

SEQ ID NO: 7774 - DNA, 22 bp, Artificial Sequence
  Description of Artificial Sequence: Synthetic oligonucleotide
aaaacgtgagttcgtttaggta

SEQ ID NO: 7775 - DNA, 22 bp, Artificial Sequence
  Description of Artificial Sequence: Synthetic oligonucleotide
ataatagtagggattcgcggag

SEQ ID NO: 7776 - DNA, 21 bp, Artificial Sequence
  Description of Artificial Sequence: Synthetic oligonucleotide
caacccgacgactaaaaattc

SEQ ID NO: 7777 - DNA, 37 bp, Artificial Sequence
  Description of Artificial Sequence: Synthetic oligonucleotide
gtcgagtaattttcgttttaattgttggggttttcgg

SEQ ID NO: 7778 - DNA, 22 bp, Artificial Sequence
  Description of Artificial Sequence: Synthetic oligonucleotide
tacgagttgtgattcgtgtttt

SEQ ID NO: 7779 - DNA, 21 bp, Artificial Sequence
  Description of Artificial Sequence: Synthetic oligonucleotide
caacacctctaacgtaccgtc

SEQ ID NO: 7780 - DNA, 26 bp, Artificial Sequence
  Description of Artificial Sequence: Synthetic oligonucleotide
atagggtttcgggcgggtattacggg

SEQ ID NO: 7781 - DNA, 23 bp, Artificial Sequence
  Description of Artificial Sequence: Synthetic oligonucleotide
attcttaactacaaccgctcgat

SEQ ID NO: 7782 - DNA, 22 bp, Artificial Sequence
  Description of Artificial Sequence: Synthetic oligonucleotide
acgagttgtgattcgtgttttt

SEQ ID NO: 7783 - DNA, 22 bp, Artificial Sequence
  Description of Artificial Sequence: Synthetic oligonucleotide
tattcttaactacaaccgctcg

SEQ ID NO: 7784 - DNA, 23 bp, Artificial Sequence
  Description of Artificial Sequence: Synthetic oligonucleotide
ctattcttaactacaaccgctcg

SEQ ID NO: 7785 - DNA, 22 bp, Artificial Sequence
  Description of Artificial Sequence: Synthetic oligonucleotide
caaaacgcgaaaacctctaaat

SEQ ID NO: 7786 - DNA, 22 bp, Artificial Sequence
  Description of Artificial Sequence: Synthetic oligonucleotide
gtataatagtagggattcgcgg

SEQ ID NO: 7787 - DNA, 25 bp, Artificial Sequence
  Description of Artificial Sequence: Synthetic oligonucleotide
gggcggtcgcggatttttgttcgat

SEQ ID NO: 7788 - DNA, 22 bp, Artificial Sequence
  Description of Artificial Sequence: Synthetic oligonucleotide
cggaagagttcggttttatttt

SEQ ID NO: 7789 - DNA, 23 bp, Artificial Sequence
  Description of Artificial Sequence: Synthetic oligonucleotide
ccatttctaacgatacgtctacc

SEQ ID NO: 7790 - DNA, 28 bp, Artificial Sequence
  Description of Artificial Sequence: Synthetic oligonucleotide
aacgcgatcgcgggagtatttgtttagg

SEQ ID NO: 7791 - DNA, 20 bp, Artificial Sequence
  Description of Artificial Sequence: Synthetic oligonucleotide
ccaacacctctaacgtaccg

SEQ ID NO: 7792 - DNA, 21 bp, Artificial Sequence
  Description of Artificial Sequence: Synthetic oligonucleotide
cgaatcacaactcgtaacaca

SEQ ID NO: 7793 - DNA, 21 bp, Artificial Sequence
  Description of Artificial Sequence: Synthetic oligonucleotide
cacgaatcacaactcgtaaca

SEQ ID NO: 7794 - DNA, 23 bp, Artificial Sequence
  Description of Artificial Sequence: Synthetic oligonucleotide
aaaacgaaaattactcgacaaaa

SEQ ID NO: 7795 - DNA, 23 bp, Artificial Sequence
  Description of Artificial Sequence: Synthetic oligonucleotide
aaaaacgtgagttcgtttaggta

SEQ ID NO: 7796 - DNA, 22 bp, Artificial Sequence
  Description of Artificial Sequence: Synthetic oligonucleotide
cgaaaacctctaaataccgacc

SEQ ID NO: 7797 - DNA, 21 bp, Artificial Sequence
  Description of Artificial Sequence: Synthetic oligonucleotide
cgagttgtgattcgtgttttt

SEQ ID NO: 7798 - DNA, 24 bp, Artificial Sequence
  Description of Artificial Sequence: Synthetic oligonucleotide
accatttctaacgatacgtctacc

SEQ ID NO: 7799 - DNA, 21 bp, Artificial Sequence
  Description of Artificial Sequence: Synthetic oligonucleotide
taatagtagggattcgcggag

SEQ ID NO: 7800 - DNA, 20 bp, Artificial Sequence
  Description of Artificial Sequence: Synthetic oligonucleotide
taactacaaccgctcgatcc

SEQ ID NO: 7801 - DNA, 41 bp, Artificial Sequence
  Description of Artificial Sequence: Synthetic oligonucleotide
atttttacgtaggtgggtaattggtttaaaaatcgtcgata

SEQ ID NO: 7802 - DNA, 21 bp, Artificial Sequence
  Description of Artificial Sequence: Synthetic oligonucleotide
ttaactacaaccgctcgatcc

SEQ ID NO: 7803 - DNA, 21 bp, Artificial Sequence
  Description of Artificial Sequence: Synthetic oligonucleotide
tcttaactacaaccgctcgat

SEQ ID NO: 7804 - DNA, 41 bp, Artificial Sequence
  Description of Artificial Sequence: Synthetic oligonucleotide
ttttacgtaggtgggtaattggtttaaaaatcgtcgataaa

SEQ ID NO: 7805 - DNA, 23 bp, Artificial Sequence
  Description of Artificial Sequence: Synthetic oligonucleotide
tataatagtagggattcgcggag

SEQ ID NO: 7806 - DNA, 37 bp, Artificial Sequence
  Description of Artificial Sequence: Synthetic oligonucleotide
gttttgtcgagtaattttcgttttaattgttggggtt

SEQ ID NO: 7807 - DNA, 22 bp, Artificial Sequence
  Description of Artificial Sequence: Synthetic oligonucleotide
tgttacgagttgtgattcgtgt

SEQ ID NO: 7808 - DNA, 19 bp, Artificial Sequence
  Description of Artificial Sequence: Synthetic oligonucleotide
acctctaacgtaccgtcgc

SEQ ID NO: 7809 - DNA, 22 bp, Artificial Sequence
  Description of Artificial Sequence: Synthetic oligonucleotide
gtgttacgagttgtgattcgtg

SEQ ID NO: 7810 - DNA, 23 bp, Artificial Sequence
  Description of Artificial Sequence: Synthetic oligonucleotide
aaacgtgagttcgtttaggtaat

SEQ ID NO: 7811 - DNA, 21 bp, Artificial Sequence
  Description of Artificial Sequence: Synthetic oligonucleotide
aaaaacgtgagttcgtttagg

SEQ ID NO: 7812 - DNA, 22 bp, Artificial Sequence
  Description of Artificial Sequence: Synthetic oligonucleotide
aacgcgaaaacctctaaatacc

SEQ ID NO: 7813 - DNA, 20 bp, Artificial Sequence
  Description of Artificial Sequence: Synthetic oligonucleotide
ccaacccgacgactaaaaat

SEQ ID NO: 7814 - DNA, 24 bp, Artificial Sequence
  Description of Artificial Sequence: Synthetic oligonucleotide
taaaacgaaaattactcgacaaaa

SEQ ID NO: 7815 - DNA, 23 bp, Artificial Sequence
  Description of Artificial Sequence: Synthetic oligonucleotide
ttttgtcgagtaattttcgtttt

SEQ ID NO: 7816 - DNA, 22 bp, Artificial Sequence
  Description of Artificial Sequence: Synthetic oligonucleotide
atcacaactcgtaacacaaccg

SEQ ID NO: 7817 - DNA, 22 bp, Artificial Sequence
  Description of Artificial Sequence: Synthetic oligonucleotide
ttacgagttgtgattcgtgttt

SEQ ID NO: 7818 - DNA, 25 bp, Artificial Sequence
  Description of Artificial Sequence: Synthetic oligonucleotide
taccatttctaacgatacgtctacc

SEQ ID NO: 7819 - DNA, 22 bp, Artificial Sequence
  Description of Artificial Sequence: Synthetic oligonucleotide
ttgtgttacgagttgtgattcg

SEQ ID NO: 7820 - DNA, 20 bp, Artificial Sequence
  Description of Artificial Sequence: Synthetic oligonucleotide
aatagtagggattcgcggag

SEQ ID NO: 7821 - DNA, 23 bp, Artificial Sequence
  Description of Artificial Sequence: Synthetic oligonucleotide
ttaaaacgaaaattactcgacaa

SEQ ID NO: 7822 - DNA, 20 bp, Artificial Sequence
  Description of Artificial Sequence: Synthetic oligonucleotide
gtttttaggtcgggtcgatt

SEQ ID NO: 7823 - DNA, 22 bp, Artificial Sequence
  Description of Artificial Sequence: Synthetic oligonucleotide
tttgtcgagtaattttcgtttt

SEQ ID NO: 7824 - DNA, 21 bp, Artificial Sequence
  Description of Artificial Sequence: Synthetic oligonucleotide
gacggtacgttagaggtgttg

SEQ ID NO: 7825 - DNA, 20 bp, Artificial Sequence
  Description of Artificial Sequence: Synthetic oligonucleotide
actcaaatatcgcactcgct

SEQ ID NO: 7826 - DNA, 35 bp, Artificial Sequence
  Description of Artificial Sequence: Synthetic oligonucleotide
agttcggtcgttagtttatttagtaaggcggttat

SEQ ID NO: 7827 - DNA, 20 bp, Artificial Sequence
  Description of Artificial Sequence: Synthetic oligonucleotide
cacaactcgtaacacaaccg

SEQ ID NO: 7828 - DNA, 20 bp, Artificial Sequence
  Description of Artificial Sequence: Synthetic oligonucleotide
cggtacgttagaggtgttgg

SEQ ID NO: 7829 - DNA, 20 bp, Artificial Sequence
  Description of Artificial Sequence: Synthetic oligonucleotide
aactcaaatatcgcactcgc

SEQ ID NO: 7830 - DNA, 19 bp, Artificial Sequence
  Description of Artificial Sequence: Synthetic oligonucleotide
aactacaaccgctcgatcc

SEQ ID NO: 7831 - DNA, 41 bp, Artificial Sequence
  Description of Artificial Sequence: Synthetic oligonucleotide
gatttttacgtaggtgggtaattggtttaaaaatcgtcgat

SEQ ID NO: 7832 - DNA, 19 bp, Artificial Sequence
  Description of Artificial Sequence: Synthetic oligonucleotide
gcgacggtacgttagaggt

SEQ ID NO: 7833 - DNA, 21 bp, Artificial Sequence
  Description of Artificial Sequence: Synthetic oligonucleotide
acaactcaaatatcgcactcg

SEQ ID NO: 7834 - DNA, 20 bp, Artificial Sequence
  Description of Artificial Sequence: Synthetic oligonucleotide
cgacggtacgttagaggtgt

SEQ ID NO: 7835 - DNA, 21 bp, Artificial Sequence
  Description of Artificial Sequence: Synthetic oligonucleotide
acgcgaaaacctctaaatacc

SEQ ID NO: 7836 - DNA, 21 bp, Artificial Sequence
  Description of Artificial Sequence: Synthetic oligonucleotide
ctcaaaacgcgaaaacctcta

SEQ ID NO: 7837 - DNA, 24 bp, Artificial Sequence
  Description of Artificial Sequence: Synthetic oligonucleotide
ttgtcgagtaattttcgttttaat

SEQ ID NO: 7838 - DNA, 22 bp, Artificial Sequence
  Description of Artificial Sequence: Synthetic oligonucleotide
cgaatcacaactcgtaacacaa

SEQ ID NO: 7839 - DNA, 22 bp, Artificial Sequence
  Description of Artificial Sequence: Synthetic oligonucleotide
gttacgagttgtgattcgtgtt

SEQ ID NO: 7840 - DNA, 20 bp, Artificial Sequence
  Description of Artificial Sequence: Synthetic oligonucleotide
tcaaaacgcgaaaacctcta

SEQ ID NO: 7841 - DNA, 19 bp, Artificial Sequence
  Description of Artificial Sequence: Synthetic oligonucleotide
ctccaacccgacgactaaa

SEQ ID NO: 7842 - DNA, 25 bp, Artificial Sequence
  Description of Artificial Sequence: Synthetic oligonucleotide
aattaaaacgaaaattactcgacaa

SEQ ID NO: 7843 - DNA, 20 bp, Artificial Sequence
  Description of Artificial Sequence: Synthetic oligonucleotide
gcggaagagttcggttttat

SEQ ID NO: 7844 - DNA, 24 bp, Artificial Sequence
  Description of Artificial Sequence: Synthetic oligonucleotide
ccatttctaacgatacgtctacct

SEQ ID NO: 7845 - DNA, 21 bp, Artificial Sequence
  Description of Artificial Sequence: Synthetic oligonucleotide
acggtacgttagaggtgttgg

SEQ ID NO: 7846 - DNA, 22 bp, Artificial Sequence
  Description of Artificial Sequence: Synthetic oligonucleotide
aacaactcaaatatcgcactcg

SEQ ID NO: 7847 - DNA, 21 bp, Artificial Sequence
  Description of Artificial Sequence: Synthetic oligonucleotide
tcacaactcgtaacacaaccg

SEQ ID NO: 7848 - DNA, 20 bp, Artificial Sequence
  Description of Artificial Sequence: Synthetic oligonucleotide
acaactcgtaacacaaccgc

SEQ ID NO: 7849 - DNA, 19 bp, Artificial Sequence
  Description of Artificial Sequence: Synthetic oligonucleotide
aaccgctcgatccctttat

SEQ ID NO: 7850 - DNA, 34 bp, Artificial Sequence
  Description of Artificial Sequence: Synthetic oligonucleotide
atcggattgatttttacgtaggtgggtaattggt

SEQ ID NO: 7851 - DNA, 21 bp, Artificial Sequence
  Description of Artificial Sequence: Synthetic oligonucleotide
aaaacgtgagttcgtttaggt

SEQ ID NO: 7852 - DNA, 21 bp, Artificial Sequence
  Description of Artificial Sequence: Synthetic oligonucleotide
cgacggtacgttagaggtgtt

SEQ ID NO: 7853 - DNA, 24 bp, Artificial Sequence
  Description of Artificial Sequence: Synthetic oligonucleotide
attaaaacgaaaattactcgacaa

SEQ ID NO: 7854 - DNA, 24 bp, Artificial Sequence
  Description of Artificial Sequence: Synthetic oligonucleotide
caattaaaacgaaaattactcgac

SEQ ID NO: 7855 - DNA, 19 bp, Artificial Sequence
  Description of Artificial Sequence: Synthetic oligonucleotide
gctcgatccctttatcgac

SEQ ID NO: 7856 - DNA, 23 bp, Artificial Sequence
  Description of Artificial Sequence: Synthetic oligonucleotide
cgacctattcttaactacaaccg

SEQ ID NO: 7857 - DNA, 18 bp, Artificial Sequence
  Description of Artificial Sequence: Synthetic oligonucleotide
gttatagggtttcgggcg

SEQ ID NO: 7858 - DNA, 22 bp, Artificial Sequence
  Description of Artificial Sequence: Synthetic oligonucleotide
actcgctatcgctaaacgtaat

SEQ ID NO: 7859 - DNA, 26 bp, Artificial Sequence
  Description of Artificial Sequence: Synthetic oligonucleotide
ggtacgttagaggtgttgggcgtcgt

SEQ ID NO: 7860 - DNA, 19 bp, Artificial Sequence
  Description of Artificial Sequence: Synthetic oligonucleotide
tacgggaattagcggtgag

SEQ ID NO: 7861 - DNA, 22 bp, Artificial Sequence
  Description of Artificial Sequence: Synthetic oligonucleotide
gtcctttcgacgtaaaataccc

SEQ ID NO: 7862 - DNA, 38 bp, Artificial Sequence
  Description of Artificial Sequence: Synthetic oligonucleotide
ggaattcgaattgtaagttgagcgtttgtttagatttt

SEQ ID NO: 7863 - DNA, 23 bp, Artificial Sequence
  Description of Artificial Sequence: Synthetic oligonucleotide
tgtcgagtaattttcgttttaat

SEQ ID NO: 7864 - DNA, 24 bp, Artificial Sequence
  Description of Artificial Sequence: Synthetic oligonucleotide
tattcttaactacaaccgctcgat

SEQ ID NO: 7865 - DNA, 22 bp, Artificial Sequence
  Description of Artificial Sequence: Synthetic oligonucleotide
acgaactataacccgtattccc

SEQ ID NO: 7866 - DNA, 22 bp, Artificial Sequence
  Description of Artificial Sequence: Synthetic oligonucleotide
acgtttagtatttttggcgtgt

SEQ ID NO: 7867 - DNA, 33 bp, Artificial Sequence
  Description of Artificial Sequence: Synthetic oligonucleotide
ttcgtagtgttcgttcggaattttgtgatagga

SEQ ID NO: 7868 - DNA, 22 bp, Artificial Sequence
  Description of Artificial Sequence: Synthetic oligonucleotide
cgaactataacccgtattccct

SEQ ID NO: 7869 - DNA, 22 bp, Artificial Sequence
  Description of Artificial Sequence: Synthetic oligonucleotide
tttagtatttttggcgtgtcgt

SEQ ID NO: 7870 - DNA, 22 bp, Artificial Sequence
  Description of Artificial Sequence: Synthetic oligonucleotide
cgtttagtatttttggcgtgtc

SEQ ID NO: 7871 - DNA, 22 bp, Artificial Sequence
  Description of Artificial Sequence: Synthetic oligonucleotide
gacgtttagtatttttggcgtg

SEQ ID NO: 7872 - DNA, 22 bp, Artificial Sequence
  Description of Artificial Sequence: Synthetic oligonucleotide
gtggcgacgtttagtatttttg

SEQ ID NO: 7873 - DNA, 22 bp, Artificial Sequence
  Description of Artificial Sequence: Synthetic oligonucleotide
gtttagtatttttggcgtgtcg

SEQ ID NO: 7874 - DNA, 22 bp, Artificial Sequence
  Description of Artificial Sequence: Synthetic oligonucleotide
cgaataatcctcgccttaacta

SEQ ID NO: 7875 - DNA, 23 bp, Artificial Sequence
  Description of Artificial Sequence: Synthetic oligonucleotide
ttcgtaatatagtcgttcgtcgt

SEQ ID NO: 7876 - DNA, 31 bp, Artificial Sequence
  Description of Artificial Sequence: Synthetic oligonucleotide
agttcggcggttagaggttttttcgaagatt

SEQ ID NO: 7877 - DNA, 21 bp, Artificial Sequence
  Description of Artificial Sequence: Synthetic oligonucleotide
tggcgacgtttagtatttttg

SEQ ID NO: 7878 - DNA, 21 bp, Artificial Sequence
  Description of Artificial Sequence: Synthetic oligonucleotide
tagtatttttggcgtgtcgtc

SEQ ID NO: 7879 - DNA, 22 bp, Artificial Sequence
  Description of Artificial Sequence: Synthetic oligonucleotide
ttagtatttttggcgtgtcgtc

SEQ ID NO: 7880 - DNA, 21 bp, Artificial Sequence
  Description of Artificial Sequence: Synthetic oligonucleotide
ggtggcgacgtttagtatttt

SEQ ID NO: 7881 - DNA, 21 bp, Artificial Sequence
  Description of Artificial Sequence: Synthetic oligonucleotide
caaaaatactaaacgtcgcca

SEQ ID NO: 7882 - DNA, 22 bp, Artificial Sequence
  Description of Artificial Sequence: Synthetic oligonucleotide
agatgtcgtattcgttgtcgtt

SEQ ID NO: 7883 - DNA, 32 bp, Artificial Sequence
  Description of Artificial Sequence: Synthetic oligonucleotide
gtcgttttgttggatagattggcggtcgggtt

SEQ ID NO: 7884 - DNA, 22 bp, Artificial Sequence
  Description of Artificial Sequence: Synthetic oligonucleotide
tagatgtcgtattcgttgtcgt

SEQ ID NO: 7885 - DNA, 22 bp, Artificial Sequence
  Description of Artificial Sequence: Synthetic oligonucleotide
cgcgaatcataataaaacacaa

SEQ ID NO: 7886 - DNA, 21 bp, Artificial Sequence
  Description of Artificial Sequence: Synthetic oligonucleotide
tttttagttcggcggttagag

SEQ ID NO: 7887 - DNA, 30 bp, Artificial Sequence
  Description of Artificial Sequence: Synthetic oligonucleotide
aggcgaggattattcggtaaggcgatagag

SEQ ID NO: 7888 - DNA, 22 bp, Artificial Sequence
  Description of Artificial Sequence: Synthetic oligonucleotide
tcgtaatatagtcgttcgtcgt

SEQ ID NO: 7889 - DNA, 21 bp, Artificial Sequence
  Description of Artificial Sequence: Synthetic oligonucleotide
ccaaaaatactaaacgtcgcc

SEQ ID NO: 7890 - DNA, 22 bp, Artificial Sequence
  Description of Artificial Sequence: Synthetic oligonucleotide
ttagatgtcgtattcgttgtcg

SEQ ID NO: 7891 - DNA, 27 bp, Artificial Sequence
  Description of Artificial Sequence: Synthetic oligonucleotide
tgttggatagattggcggtcgggttgg

SEQ ID NO: 7892 - DNA, 21 bp, Artificial Sequence
  Description of Artificial Sequence: Synthetic oligonucleotide
aaaatactaaacgtcgccacc

SEQ ID NO: 7893 - DNA, 32 bp, Artificial Sequence
  Description of Artificial Sequence: Synthetic oligonucleotide
ggtcgttttgttggatagattggcggtcgggt

SEQ ID NO: 7894 - DNA, 21 bp, Artificial Sequence
  Description of Artificial Sequence: Synthetic oligonucleotide
gccaaaaatactaaacgtcgc

SEQ ID NO: 7895 - DNA, 26 bp, Artificial Sequence
  Description of Artificial Sequence: Synthetic oligonucleotide
ttggatagattggcggtcgggttggt

SEQ ID NO: 7896 - DNA, 22 bp, Artificial Sequence
  Description of Artificial Sequence: Synthetic oligonucleotide
aaaacctaaaaactacgacgct

SEQ ID NO: 7897 - DNA, 22 bp, Artificial Sequence
  Description of Artificial Sequence: Synthetic oligonucleotide
gattattcggtaaggcgataga

SEQ ID NO: 7898 - DNA, 25 bp, Artificial Sequence
  Description of Artificial Sequence: Synthetic oligonucleotide
gtcgggtaggagttcgcggtcgttt

SEQ ID NO: 7899 - DNA, 21 bp, Artificial Sequence
  Description of Artificial Sequence: Synthetic oligonucleotide
ggcgacgtttagtatttttgg

SEQ ID NO: 7900 - DNA, 22 bp, Artificial Sequence
  Description of Artificial Sequence: Synthetic oligonucleotide
tatcgccttaccgaataatcct

SEQ ID NO: 7901 - DNA, 37 bp, Artificial Sequence
  Description of Artificial Sequence: Synthetic oligonucleotide
ggcggttagaggttttttcgaagattttagtagttaa

SEQ ID NO: 7902 - DNA, 22 bp, Artificial Sequence
  Description of Artificial Sequence: Synthetic oligonucleotide
aaaaatactaaacgtcgccacc

SEQ ID NO: 7903 - DNA, 21 bp, Artificial Sequence
  Description of Artificial Sequence: Synthetic oligonucleotide
gcgacgtttagtatttttggc

SEQ ID NO: 7904 - DNA, 22 bp, Artificial Sequence
  Description of Artificial Sequence: Synthetic oligonucleotide
cgaataaaaacacctctaacgc

SEQ ID NO: 7905 - DNA, 20 bp, Artificial Sequence
  Description of Artificial Sequence: Synthetic oligonucleotide
agtcggtaagggaattttcg

SEQ ID NO: 7906 - DNA, 42 bp, Artificial Sequence
  Description of Artificial Sequence: Synthetic oligonucleotide
tagatcgcgtttttaatttttgttgaattggagtcgttaggg

SEQ ID NO: 7907 - DNA, 22 bp, Artificial Sequence
  Description of Artificial Sequence: Synthetic oligonucleotide
acctctatcgccttaccgaata

SEQ ID NO: 7908 - DNA, 36 bp, Artificial Sequence
  Description of Artificial Sequence: Synthetic oligonucleotide
gaggttttttcgaagattttagtagttaaggcgagg

SEQ ID NO: 7909 - DNA, 22 bp, Artificial Sequence
  Description of Artificial Sequence: Synthetic oligonucleotide
acgcgaatcataataaaacaca

SEQ ID NO: 7910 - DNA, 20 bp, Artificial Sequence
  Description of Artificial Sequence: Synthetic oligonucleotide
aatactaaacgtcgccacca

SEQ ID NO: 7911 - DNA, 32 bp, Artificial Sequence
  Description of Artificial Sequence: Synthetic oligonucleotide
tggtcgttttgttggatagattggcggtcggg

SEQ ID NO: 7912 - DNA, 21 bp, Artificial Sequence
  Description of Artificial Sequence: Synthetic oligonucleotide
gttggtggcgacgtttagtat

SEQ ID NO: 7913 - DNA, 21 bp, Artificial Sequence
  Description of Artificial Sequence: Synthetic oligonucleotide
cctctatcgccttaccgaata

SEQ ID NO: 7914 - DNA, 22 bp, Artificial Sequence
  Description of Artificial Sequence: Synthetic oligonucleotide
aggattattcggtaaggcgata

SEQ ID NO: 7915 - DNA, 24 bp, Artificial Sequence
  Description of Artificial Sequence: Synthetic oligonucleotide
ggtcgggtaggagttcgcggtcgt

SEQ ID NO: 7916 - DNA, 22 bp, Artificial Sequence
  Description of Artificial Sequence: Synthetic oligonucleotide
ggattattcggtaaggcgatag

SEQ ID NO: 7917 - DNA, 23 bp, Artificial Sequence
  Description of Artificial Sequence: Synthetic oligonucleotide
cgacgaacgactatattacgaac

SEQ ID NO: 7918 - DNA, 22 bp, Artificial Sequence
  Description of Artificial Sequence: Synthetic oligonucleotide
ggtggcgacgtttagtattttt

SEQ ID NO: 7919 - DNA, 20 bp, Artificial Sequence
  Description of Artificial Sequence: Synthetic oligonucleotide
ttggtggcgacgtttagtat

SEQ ID NO: 7920 - DNA, 20 bp, Artificial Sequence
  Description of Artificial Sequence: Synthetic oligonucleotide
tggtggcgacgtttagtatt

SEQ ID NO: 7921 - DNA, 20 bp, Artificial Sequence
  Description of Artificial Sequence: Synthetic oligonucleotide
agtatttttggcgtgtcgtc

SEQ ID NO: 7922 - DNA, 22 bp, Artificial Sequence
  Description of Artificial Sequence: Synthetic oligonucleotide
cgttctaaactcctaaccgaaa

SEQ ID NO: 7923 - DNA, 20 bp, Artificial Sequence
  Description of Artificial Sequence: Synthetic oligonucleotide
gtagttgttcgtaggcgtgg

SEQ ID NO: 7924 - DNA, 29 bp, Artificial Sequence
  Description of Artificial Sequence: Synthetic oligonucleotide
gttagcgggtggggaagtagagtcggtaa

SEQ ID NO: 7925 - DNA, 21 bp, Artificial Sequence
  Description of Artificial Sequence: Synthetic oligonucleotide
aaatactaaacgtcgccacca

SEQ ID NO: 7926 - DNA, 21 bp, Artificial Sequence
  Description of Artificial Sequence: Synthetic oligonucleotide
atactaaacgtcgccaccaac

SEQ ID NO: 7927 - DNA, 32 bp, Artificial Sequence
  Description of Artificial Sequence: Synthetic oligonucleotide
tgaagtggtcgttttgttggatagattggcgg

SEQ ID NO: 7928 - DNA, 21 bp, Artificial Sequence
  Description of Artificial Sequence: Synthetic oligonucleotide
caacaaaaattaaaaacgcga

SEQ ID NO: 7929 - DNA, 22 bp, Artificial Sequence
  Description of Artificial Sequence: Synthetic oligonucleotide
gttgtagttgttcgtaggcgtg

SEQ ID NO: 7930 - DNA, 33 bp, Artificial Sequence
  Description of Artificial Sequence: Synthetic oligonucleotide
ggaattttcggttaggagtttagaacgtagggt

SEQ ID NO: 7931 - DNA, 22 bp, Artificial Sequence
  Description of Artificial Sequence: Synthetic oligonucleotide
tgttgtagttgttcgtaggcgt

SEQ ID NO: 7932 - DNA, 23 bp, Artificial Sequence
  Description of Artificial Sequence: Synthetic oligonucleotide
ttagatgtcgtattcgttgtcgt

SEQ ID NO: 7933 - DNA, 21 bp, Artificial Sequence
  Description of Artificial Sequence: Synthetic oligonucleotide
taccgaataatcctcgcctta

SEQ ID NO: 7934 - DNA, 20 bp, Artificial Sequence
  Description of Artificial Sequence: Synthetic oligonucleotide
atactaaacgtcgccaccaa

SEQ ID NO: 7935 - DNA, 32 bp, Artificial Sequence
  Description of Artificial Sequence: Synthetic oligonucleotide
gtggtcgttttgttggatagattggcggtcgg

SEQ ID NO: 7936 - DNA, 22 bp, Artificial Sequence
  Description of Artificial Sequence: Synthetic oligonucleotide
cgtaatatagtcgttcgtcgtt

SEQ ID NO: 7937 - DNA, 22 bp, Artificial Sequence
  Description of Artificial Sequence: Synthetic oligonucleotide
acgacgaacgactatattacga

SEQ ID NO: 7938 - DNA, 21 bp, Artificial Sequence
  Description of Artificial Sequence: Synthetic oligonucleotide
ttgtagttgttcgtaggcgtg

SEQ ID NO: 7939 - DNA, 20 bp, Artificial Sequence
  Description of Artificial Sequence: Synthetic oligonucleotide
ttttagttcggcggttagag

SEQ ID NO: 7940 - DNA, 21 bp, Artificial Sequence
  Description of Artificial Sequence: Synthetic oligonucleotide
gagtcggtaagggaattttcg

SEQ ID NO: 7941 - DNA, 22 bp, Artificial Sequence
  Description of Artificial Sequence: Synthetic oligonucleotide
ttaccgaataatcctcgcctta

SEQ ID NO: 7942 - DNA, 21 bp, Artificial Sequence
  Description of Artificial Sequence: Synthetic oligonucleotide
cgacgtttagtatttttggcg

SEQ ID NO: 7943 - DNA, 20 bp, Artificial Sequence
  Description of Artificial Sequence: Synthetic oligonucleotide
ttagttcggcggttagaggt

SEQ ID NO: 7944 - DNA, 20 bp, Artificial Sequence
  Description of Artificial Sequence: Synthetic oligonucleotide
tagttcggcggttagaggtt

SEQ ID NO: 7945 - DNA, 21 bp, Artificial Sequence
  Description of Artificial Sequence: Synthetic oligonucleotide
atcgccttaccgaataatcct

SEQ ID NO: 7946 - DNA, 20 bp, Artificial Sequence
  Description of Artificial Sequence: Synthetic oligonucleotide
cttaccgaataatcctcgcc

SEQ ID NO: 7947 - DNA, 22 bp, Artificial Sequence
  Description of Artificial Sequence: Synthetic oligonucleotide
agggaatacgggttatagttcg

SEQ ID NO: 7948 - DNA, 23 bp, Artificial Sequence
  Description of Artificial Sequence: Synthetic oligonucleotide
aacgcgaatcataataaaacaca

SEQ ID NO: 7949 - DNA, 21 bp, Artificial Sequence
  Description of Artificial Sequence: Synthetic oligonucleotide
taaggcgaggattattcggta

SEQ ID NO: 7950 - DNA, 22 bp, Artificial Sequence
  Description of Artificial Sequence: Synthetic oligonucleotide
acctaaaaactacgacgctaaa

SEQ ID NO: 7951 - DNA, 22 bp, Artificial Sequence
  Description of Artificial Sequence: Synthetic oligonucleotide
aacctaaaaactacgacgctaa

SEQ ID NO: 7952 - DNA, 21 bp, Artificial Sequence
  Description of Artificial Sequence: Synthetic oligonucleotide
cgaataatcctcgccttaact

SEQ ID NO: 7953 - DNA, 22 bp, Artificial Sequence
  Description of Artificial Sequence: Synthetic oligonucleotide
caaaaattaaaaacgcgatcta

SEQ ID NO: 7954 - DNA, 20 bp, Artificial Sequence
  Description of Artificial Sequence: Synthetic oligonucleotide
tactaaacgtcgccaccaac

SEQ ID NO: 7955 - DNA, 22 bp, Artificial Sequence
  Description of Artificial Sequence: Synthetic oligonucleotide
tcaacaaaaattaaaaacgcga

SEQ ID NO: 7956 - DNA, 23 bp, Artificial Sequence
  Description of Artificial Sequence: Synthetic oligonucleotide
aacctaaaaactacgacgctaaa

SEQ ID NO: 7957 - DNA, 23 bp, Artificial Sequence
  Description of Artificial Sequence: Synthetic oligonucleotide
aaacctaaaaactacgacgctaa

SEQ ID NO: 7958 - DNA, 24 bp, Artificial Sequence
  Description of Artificial Sequence: Synthetic oligonucleotide
gggtaatttagatgtcgtattcgt

SEQ ID NO: 7959 - DNA, 28 bp, Artificial Sequence
  Description of Artificial Sequence: Synthetic oligonucleotide
tgtcgttggacgtgatggagatggttga

SEQ ID NO: 7960 - DNA, 22 bp, Artificial Sequence
  Description of Artificial Sequence: Synthetic oligonucleotide
ttaaggcgaggattattcggta

SEQ ID NO: 7961 - DNA, 33 bp, Artificial Sequence
  Description of Artificial Sequence: Synthetic oligonucleotide
ggcgatagaggtcgggtaggagttcgcggtcgt

SEQ ID NO: 7962 - DNA, 21 bp, Artificial Sequence
  Description of Artificial Sequence: Synthetic oligonucleotide
agatgtcgtattcgttgtcgt

SEQ ID NO: 7963 - DNA, 23 bp, Artificial Sequence
  Description of Artificial Sequence: Synthetic oligonucleotide
acaaaaattaaaaacgcgatcta

SEQ ID NO: 7964 - DNA, 20 bp, Artificial Sequence
  Description of Artificial Sequence: Synthetic oligonucleotide
caaccgaactaacccctacg

SEQ ID NO: 7965 - DNA, 22 bp, Artificial Sequence
  Description of Artificial Sequence: Synthetic oligonucleotide
gcgttagaggtgtttttattcg

SEQ ID NO: 7966 - DNA, 45 bp, Artificial Sequence
  Description of Artificial Sequence: Synthetic oligonucleotide
agcgcggaggtttttaggtatcgatttgtttttggttgtagtcgt

SEQ ID NO: 7967 - DNA, 20 bp, Artificial Sequence
  Description of Artificial Sequence: Synthetic oligonucleotide
tttagttcggcggttagagg

SEQ ID NO: 7968 - DNA, 24 bp, Artificial Sequence
  Description of Artificial Sequence: Synthetic oligonucleotide
cgacgaacgactatattacgaact

SEQ ID NO: 7969 - DNA, 20 bp, Artificial Sequence
  Description of Artificial Sequence: Synthetic oligonucleotide
tgtagttgttcgtaggcgtg

SEQ ID NO: 7970 - DNA, 21 bp, Artificial Sequence
  Description of Artificial Sequence: Synthetic oligonucleotide
tggtggcgacgtttagtattt

SEQ ID NO: 7971 - DNA, 21 bp, Artificial Sequence
  Description of Artificial Sequence: Synthetic oligonucleotide
cttaccgaataatcctcgcct

SEQ ID NO: 7972 - DNA, 21 bp, Artificial Sequence
  Description of Artificial Sequence: Synthetic oligonucleotide
actcctacccgacctctatcg

SEQ ID NO: 7973 - DNA, 19 bp, Artificial Sequence
  Description of Artificial Sequence: Synthetic oligonucleotide
cactaacgccctttaaccg

SEQ ID NO: 7974 - DNA, 22 bp, Artificial Sequence
  Description of Artificial Sequence: Synthetic oligonucleotide
ttagtttgtagttcgggtttcg

SEQ ID NO: 7975 - DNA, 36 bp, Artificial Sequence
  Description of Artificial Sequence: Synthetic oligonucleotide
taagaagaacgtggtgttgggttaggttttatcgtt

SEQ ID NO: 7976 - DNA, 20 bp, Artificial Sequence
  Description of Artificial Sequence: Synthetic oligonucleotide
aaaccgaacgactacaacca

SEQ ID NO: 7977 - DNA, 22 bp, Artificial Sequence
  Description of Artificial Sequence: Synthetic oligonucleotide
tagatcgcgtttttaatttttg

SEQ ID NO: 7978 - DNA, 30 bp, Artificial Sequence
  Description of Artificial Sequence: Synthetic oligonucleotide
agcgcggaggtttttaggtatcgatttgtt

SEQ ID NO: 7979 - DNA, 20 bp, Artificial Sequence
  Description of Artificial Sequence: Synthetic oligonucleotide
cgccttaccgaataatcctc

SEQ ID NO: 7980 - DNA, 20 bp, Artificial Sequence
  Description of Artificial Sequence: Synthetic oligonucleotide
tcgccttaccgaataatcct

SEQ ID NO: 7981 - DNA, 20 bp, Artificial Sequence
  Description of Artificial Sequence: Synthetic oligonucleotide
ccttaccgaataatcctcgc

SEQ ID NO: 7982 - DNA, 20 bp, Artificial Sequence
  Description of Artificial Sequence: Synthetic oligonucleotide
accgaataatcctcgcctta

SEQ ID NO: 7983 - DNA, 23 bp, Artificial Sequence
  Description of Artificial Sequence: Synthetic oligonucleotide
acgttctaaactcctaaccgaaa

SEQ ID NO: 7984 - DNA, 29 bp, Artificial Sequence
  Description of Artificial Sequence: Synthetic oligonucleotide
ttagcgggtggggaagtagagtcggtaag

SEQ ID NO: 7985 - DNA, 21 bp, Artificial Sequence
  Description of Artificial Sequence: Synthetic oligonucleotide
ctctatcgccttaccgaataa

SEQ ID NO: 7986 - DNA, 19 bp, Artificial Sequence
  Description of Artificial Sequence: Synthetic oligonucleotide
ttaccgaataatcctcgcc

SEQ ID NO: 7987 - DNA, 20 bp, Artificial Sequence
  Description of Artificial Sequence: Synthetic oligonucleotide
ctcctacccgacctctatcg

SEQ ID NO: 7988 - DNA, 19 bp, Artificial Sequence
  Description of Artificial Sequence: Synthetic oligonucleotide
tactaaacgtcgccaccaa

SEQ ID NO: 7989 - DNA, 23 bp, Artificial Sequence
  Description of Artificial Sequence: Synthetic oligonucleotide
tttagatgtcgtattcgttgtcg

SEQ ID NO: 7990 - DNA, 19 bp, Artificial Sequence
  Description of Artificial Sequence: Synthetic oligonucleotide
gtcggtaagggaattttcg

SEQ ID NO: 7991 - DNA, 23 bp, Artificial Sequence
  Description of Artificial Sequence: Synthetic oligonucleotide
aaaacgcgaatcataataaaaca

SEQ ID NO: 7992 - DNA, 22 bp, Artificial Sequence
  Description of Artificial Sequence: Synthetic oligonucleotide
tttaatgtatagagtcgtggcg

SEQ ID NO: 7993 - DNA, 22 bp, Artificial Sequence
  Description of Artificial Sequence: Synthetic oligonucleotide
cgacgatacgcaaaactaacta

SEQ ID NO: 7994 - DNA, 25 bp, Artificial Sequence
  Description of Artificial Sequence: Synthetic oligonucleotide
gacggttgcggtaaggtaggggcgt

SEQ ID NO: 7995 - DNA, 23 bp, Artificial Sequence
  Description of Artificial Sequence: Synthetic oligonucleotide
ttttaatgtatagagtcgtggcg

SEQ ID NO: 7996 - DNA, 22 bp, Artificial Sequence
  Description of Artificial Sequence: Synthetic oligonucleotide
tatcgcgggtttagttttattt

SEQ ID NO: 7997 - DNA, 21 bp, Artificial Sequence
  Description of Artificial Sequence: Synthetic oligonucleotide
cgaaatcaccaaacgataaca

SEQ ID NO: 7998 - DNA, 35 bp, Artificial Sequence
  Description of Artificial Sequence: Synthetic oligonucleotide
agtttatttcgcggtgagcgttaagttttaaaagt

SEQ ID NO: 7999 - DNA, 23 bp, Artificial Sequence
  Description of Artificial Sequence: Synthetic oligonucleotide
gacgatacgcaaaactaactacc

SEQ ID NO: 8000 - DNA, 22 bp, Artificial Sequence
  Description of Artificial Sequence: Synthetic oligonucleotide
cgtttattttaattttggacgg

SEQ ID NO: 8001 - DNA, 21 bp, Artificial Sequence
  Description of Artificial Sequence: Synthetic oligonucleotide
taccgaaaacaccgacgatac

SEQ ID NO: 8002 - DNA, 28 bp, Artificial Sequence
  Description of Artificial Sequence: Synthetic oligonucleotide
tgcggtaaggtaggggcgtttagaaagg

SEQ ID NO: 8003 - DNA, 22 bp, Artificial Sequence
  Description of Artificial Sequence: Synthetic oligonucleotide
tcgtttattttaattttggacg

SEQ ID NO: 8004 - DNA, 22 bp, Artificial Sequence
  Description of Artificial Sequence: Synthetic oligonucleotide
tataccgaaaacaccgacgata

SEQ ID NO: 8005 - DNA, 20 bp, Artificial Sequence
  Description of Artificial Sequence: Synthetic oligonucleotide
accgacgatacgcaaaacta

SEQ ID NO: 8006 - DNA, 23 bp, Artificial Sequence
  Description of Artificial Sequence: Synthetic oligonucleotide
gtcgtttattttaattttggacg

SEQ ID NO: 8007 - DNA, 24 bp, Artificial Sequence
  Description of Artificial Sequence: Synthetic oligonucleotide
agtcgtttattttaattttggacg

SEQ ID NO: 8008 - DNA, 22 bp, Artificial Sequence
  Description of Artificial Sequence: Synthetic oligonucleotide
acgatacgcaaaactaactacc

SEQ ID NO: 8009 - DNA, 20 bp, Artificial Sequence
  Description of Artificial Sequence: Synthetic oligonucleotide
gcgaaatcaccaaacgataa

SEQ ID NO: 8010 - DNA, 21 bp, Artificial Sequence
  Description of Artificial Sequence: Synthetic oligonucleotide
atcgcgggtttagttttattt

SEQ ID NO: 8011 - DNA, 21 bp, Artificial Sequence
  Description of Artificial Sequence: Synthetic oligonucleotide
ccgacgatacgcaaaactaac

SEQ ID NO: 8012 - DNA, 20 bp, Artificial Sequence
  Description of Artificial Sequence: Synthetic oligonucleotide
aaattggcgcggttttatag

SEQ ID NO: 8013 - DNA, 22 bp, Artificial Sequence
  Description of Artificial Sequence: Synthetic oligonucleotide
cgaaactaacgaaaactcctca

SEQ ID NO: 8014 - DNA, 23 bp, Artificial Sequence
  Description of Artificial Sequence: Synthetic oligonucleotide
gtttgaggagggcggggtcggtt

SEQ ID NO: 8015 - DNA, 19 bp, Artificial Sequence
  Description of Artificial Sequence: Synthetic oligonucleotide
aattggcgcggttttatag

SEQ ID NO: 8016 - DNA, 22 bp, Artificial Sequence
  Description of Artificial Sequence: Synthetic oligonucleotide
ttttatcgcgggtttagtttta

SEQ ID NO: 8017 - DNA, 19 bp, Artificial Sequence
  Description of Artificial Sequence: Synthetic oligonucleotide
gcgaaatcaccaaacgata

SEQ ID NO: 8018 - DNA, 21 bp, Artificial Sequence
  Description of Artificial Sequence: Synthetic oligonucleotide
ttaatgtatagagtcgtggcg

SEQ ID NO: 8019 - DNA, 22 bp, Artificial Sequence
  Description of Artificial Sequence: Synthetic oligonucleotide
atcgcgggtttagttttatttt

SEQ ID NO: 8020 - DNA, 20 bp, Artificial Sequence
  Description of Artificial Sequence: Synthetic oligonucleotide
accgaaaacaccgacgatac

SEQ ID NO: 8021 - DNA, 21 bp, Artificial Sequence
  Description of Artificial Sequence: Synthetic oligonucleotide
atataccgaaaacaccgacga

SEQ ID NO: 8022 - DNA, 21 bp, Artificial Sequence
  Description of Artificial Sequence: Synthetic oligonucleotide
ataccgaaaacaccgacgata

SEQ ID NO: 8023 - DNA, 18 bp, Artificial Sequence
  Description of Artificial Sequence: Synthetic oligonucleotide
gaacgcgaaatcaccaaa

SEQ ID NO: 8024 - DNA, 19 bp, Artificial Sequence
  Description of Artificial Sequence: Synthetic oligonucleotide
ccgaaaacaccgacgatac

SEQ ID NO: 8025 - DNA, 18 bp, Artificial Sequence
  Description of Artificial Sequence: Synthetic oligonucleotide
gaacgaacgcgaaatcac

SEQ ID NO: 8026 - DNA, 24 bp, Artificial Sequence
  Description of Artificial Sequence: Synthetic oligonucleotide
tttttaatgtatagagtcgtggcg

SEQ ID NO: 8027 - DNA, 20 bp, Artificial Sequence
  Description of Artificial Sequence: Synthetic oligonucleotide
cgttaaggtatcgcggtttt

SEQ ID NO: 8028 - DNA, 23 bp, Artificial Sequence
  Description of Artificial Sequence: Synthetic oligonucleotide
tccataaacgtcgaaattaccta

SEQ ID NO: 8029 - DNA, 27 bp, Artificial Sequence
  Description of Artificial Sequence: Synthetic oligonucleotide
gttgaattcgggtttttcgcggggaga

SEQ ID NO: 8030 - DNA, 18 bp, Artificial Sequence
  Description of Artificial Sequence: Synthetic oligonucleotide
tcgaaggcgattttcgta

SEQ ID NO: 8031 - DNA, 22 bp, Artificial Sequence
  Description of Artificial Sequence: Synthetic oligonucleotide
cctcgaccgacaataaaaacta

SEQ ID NO: 8032 - DNA, 30 bp, Artificial Sequence
  Description of Artificial Sequence: Synthetic oligonucleotide
ttcgttgcgggagaggtcgttttttggcgt

SEQ ID NO: 8033 - DNA, 19 bp, Artificial Sequence
  Description of Artificial Sequence: Synthetic oligonucleotide
gaaaacaccgacgatacgc

SEQ ID NO: 8034 - DNA, 25 bp, Artificial Sequence
  Description of Artificial Sequence: Synthetic oligonucleotide
tagtcgtttattttaattttggacg

SEQ ID NO: 8035 - DNA, 22 bp, Artificial Sequence
  Description of Artificial Sequence: Synthetic oligonucleotide
aaacgaaaaattcccgaaataa

SEQ ID NO: 8036 - DNA, 22 bp, Artificial Sequence
  Description of Artificial Sequence: Synthetic oligonucleotide
tcgcgggataaattaagagtag

SEQ ID NO: 8037 - DNA, 38 bp, Artificial Sequence
  Description of Artificial Sequence: Synthetic oligonucleotide
ttcgcggtgggaattgtaattcggaaatttatgggcgt

SEQ ID NO: 8038 - DNA, 22 bp, Artificial Sequence
  Description of Artificial Sequence: Synthetic oligonucleotide
attaaaaacgaaaaattcccga

SEQ ID NO: 8039 - DNA, 21 bp, Artificial Sequence
  Description of Artificial Sequence: Synthetic oligonucleotide
ctacgacgaatcgcctttact

SEQ ID NO: 8040 - DNA, 22 bp, Artificial Sequence
  Description of Artificial Sequence: Synthetic oligonucleotide
attatttcgggaatttttcgtt

SEQ ID NO: 8041 - DNA, 24 bp, Artificial Sequence
  Description of Artificial Sequence: Synthetic oligonucleotide
agcgttgggatcggggatttgcgg

SEQ ID NO: 8042 - DNA, 22 bp, Artificial Sequence
  Description of Artificial Sequence: Synthetic oligonucleotide
aattatttcgggaatttttcgt

SEQ ID NO: 8043 - DNA, 21 bp, Artificial Sequence
  Description of Artificial Sequence: Synthetic oligonucleotide
aacgaaaaattcccgaaataa

SEQ ID NO: 8044 - DNA, 21 bp, Artificial Sequence
  Description of Artificial Sequence: Synthetic oligonucleotide
ctaaaacaccgcgacttctct

SEQ ID NO: 8045 - DNA, 27 bp, Artificial Sequence
  Description of Artificial Sequence: Synthetic oligonucleotide
ttcgcggagagttcgggtttaacgcgg

SEQ ID NO: 8046 - DNA, 21 bp, Artificial Sequence
  Description of Artificial Sequence: Synthetic oligonucleotide
ctaaccaaataattccgacgc

SEQ ID NO: 8047 - DNA, 22 bp, Artificial Sequence
  Description of Artificial Sequence: Synthetic oligonucleotide
aacggtgatatttcgatttttg

SEQ ID NO: 8048 - DNA, 28 bp, Artificial Sequence
  Description of Artificial Sequence: Synthetic oligonucleotide
tgagttcgcggtgggaattgtaattcgg

SEQ ID NO: 8049 - DNA, 21 bp, Artificial Sequence
  Description of Artificial Sequence: Synthetic oligonucleotide
tacgacgaatcgcctttactt

SEQ ID NO: 8050 - DNA, 21 bp, Artificial Sequence
  Description of Artificial Sequence: Synthetic oligonucleotide
ttaaaaacgaaaaattcccga

SEQ ID NO: 8051 - DNA, 22 bp, Artificial Sequence
  Description of Artificial Sequence: Synthetic oligonucleotide
cgcgggataaattaagagtagg

SEQ ID NO: 8052 - DNA, 20 bp, Artificial Sequence
  Description of Artificial Sequence: Synthetic oligonucleotide
taaccaaataattccgacgc

SEQ ID NO: 8053 - DNA, 20 bp, Artificial Sequence
  Description of Artificial Sequence: Synthetic oligonucleotide
taaaacaccgcgacttctct

SEQ ID NO: 8054 - DNA, 22 bp, Artificial Sequence
  Description of Artificial Sequence: Synthetic oligonucleotide
cgtcggaattatttggttagat

SEQ ID NO: 8055 - DNA, 21 bp, Artificial Sequence
  Description of Artificial Sequence: Synthetic oligonucleotide
tctacgacgaatcgcctttac

SEQ ID NO: 8056 - DNA, 22 bp, Artificial Sequence
  Description of Artificial Sequence: Synthetic oligonucleotide
cgcgaactcaatcctactctta

SEQ ID NO: 8057 - DNA, 21 bp, Artificial Sequence
  Description of Artificial Sequence: Synthetic oligonucleotide
cggggttattaaacggtgata

SEQ ID NO: 8058 - DNA, 24 bp, Artificial Sequence
  Description of Artificial Sequence: Synthetic oligonucleotide
tggggtttggcgtttatcgcggga

SEQ ID NO: 8059 - DNA, 22 bp, Artificial Sequence
  Description of Artificial Sequence: Synthetic oligonucleotide
ttatttcgggaatttttcgttt

SEQ ID NO: 8060 - DNA, 22 bp, Artificial Sequence
  Description of Artificial Sequence: Synthetic oligonucleotide
tcgggaatttttcgtttttaat

SEQ ID NO: 8061 - DNA, 22 bp, Artificial Sequence
  Description of Artificial Sequence: Synthetic oligonucleotide
aaacggtgatatttcgattttt

SEQ ID NO: 8062 - DNA, 20 bp, Artificial Sequence
  Description of Artificial Sequence: Synthetic oligonucleotide
gacgaatcgcctttacttcc

SEQ ID NO: 8063 - DNA, 27 bp, Artificial Sequence
  Description of Artificial Sequence: Synthetic oligonucleotide
agaagtcgcggtgttttagcgttggga

SEQ ID NO: 8064 - DNA, 21 bp, Artificial Sequence
  Description of Artificial Sequence: Synthetic oligonucleotide
cacgacttctctacgacgaat

SEQ ID NO: 8065 - DNA, 21 bp, Artificial Sequence
  Description of Artificial Sequence: Synthetic oligonucleotide
tatttcgggaatttttcgttt

SEQ ID NO: 8066 - DNA, 20 bp, Artificial Sequence
  Description of Artificial Sequence: Synthetic oligonucleotide
acgacgaatcgcctttactt

SEQ ID NO: 8067 - DNA, 20 bp, Artificial Sequence
  Description of Artificial Sequence: Synthetic oligonucleotide
taaaaacgaaaaattcccga

SEQ ID NO: 8068 - DNA, 19 bp, Artificial Sequence
  Description of Artificial Sequence: Synthetic oligonucleotide
aaacaccgcgacttctctc

SEQ ID NO: 8069 - DNA, 19 bp, Artificial Sequence
  Description of Artificial Sequence: Synthetic oligonucleotide
cgacgaatcgcctttactt

SEQ ID NO: 8070 - DNA, 20 bp, Artificial Sequence
  Description of Artificial Sequence: Synthetic oligonucleotide
tcccacgacttctctacgac

SEQ ID NO: 8071 - DNA, 19 bp, Artificial Sequence
  Description of Artificial Sequence: Synthetic oligonucleotide
aataattccgacgcccata

SEQ ID NO: 8072 - DNA, 21 bp, Artificial Sequence
  Description of Artificial Sequence: Synthetic oligonucleotide
ttcgggaatttttcgttttta

SEQ ID NO: 8073 - DNA, 21 bp, Artificial Sequence
  Description of Artificial Sequence: Synthetic oligonucleotide
cgggaatttttcgtttttaat

SEQ ID NO: 8074 - DNA, 21 bp, Artificial Sequence
  Description of Artificial Sequence: Synthetic oligonucleotide
ttcccacgacttctctacgac

SEQ ID NO: 8075 - DNA, 21 bp, Artificial Sequence
  Description of Artificial Sequence: Synthetic oligonucleotide
gcgtcggaattatttggttag

SEQ ID NO: 8076 - DNA, 20 bp, Artificial Sequence
  Description of Artificial Sequence: Synthetic oligonucleotide
aaataattccgacgcccata

SEQ ID NO: 8077 - DNA, 20 bp, Artificial Sequence
  Description of Artificial Sequence: Synthetic oligonucleotide
cttcccacgacttctctacg

SEQ ID NO: 8078 - DNA, 21 bp, Artificial Sequence
  Description of Artificial Sequence: Synthetic oligonucleotide
taaaacaccgcgacttctctc

SEQ ID NO: 8079 - DNA, 19 bp, Artificial Sequence
  Description of Artificial Sequence: Synthetic oligonucleotide
aaccaaataattccgacgc

SEQ ID NO: 8080 - DNA, 19 bp, Artificial Sequence
  Description of Artificial Sequence: Synthetic oligonucleotide
aaaacaccgcgacttctct

SEQ ID NO: 8081 - DNA, 19 bp, Artificial Sequence
  Description of Artificial Sequence: Synthetic oligonucleotide
gctaaaacaccgcgacttc

SEQ ID NO: 8082 - DNA, 23 bp, Artificial Sequence
  Description of Artificial Sequence: Synthetic oligonucleotide
cggaattatttggttagatttcg

SEQ ID NO: 8083 - DNA, 23 bp, Artificial Sequence
  Description of Artificial Sequence: Synthetic oligonucleotide
taaacggtgatatttcgattttt

SEQ ID NO: 8084 - DNA, 23 bp, Artificial Sequence
  Description of Artificial Sequence: Synthetic oligonucleotide
ttaaacggtgatatttcgatttt

SEQ ID NO: 8085 - DNA, 20 bp, Artificial Sequence
  Description of Artificial Sequence: Synthetic oligonucleotide
agtaggattgagttcgcggt

SEQ ID NO: 8086 - DNA, 33 bp, Artificial Sequence
  Description of Artificial Sequence: Synthetic oligonucleotide
attcggaaatttatgggcgtcggaattatttgg

SEQ ID NO: 8087 - DNA, 23 bp, Artificial Sequence
  Description of Artificial Sequence: Synthetic oligonucleotide
ggttattaaacggtgatatttcg

SEQ ID NO: 8088 - DNA, 21 bp, Artificial Sequence
  Description of Artificial Sequence: Synthetic oligonucleotide
acggtgatatttcgatttttg

SEQ ID NO: 8089 - DNA, 20 bp, Artificial Sequence
  Description of Artificial Sequence: Synthetic oligonucleotide
atttcgggaatttttcgttt

SEQ ID NO: 8090 - DNA, 20 bp, Artificial Sequence
  Description of Artificial Sequence: Synthetic oligonucleotide
gtcgtttcgtttggatttga

SEQ ID NO: 8091 - DNA, 22 bp, Artificial Sequence
  Description of Artificial Sequence: Synthetic oligonucleotide
cgctaactaaatacccctaccg

SEQ ID NO: 8092 - DNA, 37 bp, Artificial Sequence
  Description of Artificial Sequence: Synthetic oligonucleotide
attgagatattaaagtttagacgcgttttttggacga

SEQ ID NO: 8093 - DNA, 19 bp, Artificial Sequence
  Description of Artificial Sequence: Synthetic oligonucleotide
tcgtttcgtttggatttga

SEQ ID NO: 8094 - DNA, 22 bp, Artificial Sequence
  Description of Artificial Sequence: Synthetic oligonucleotide
cactaacgacatcttaaccgct

SEQ ID NO: 8095 - DNA, 20 bp, Artificial Sequence
  Description of Artificial Sequence: Synthetic oligonucleotide
gttacgtggggcgtttttat

SEQ ID NO: 8096 - DNA, 21 bp, Artificial Sequence
  Description of Artificial Sequence: Synthetic oligonucleotide
cgatccaacgacaactacaac

SEQ ID NO: 8097 - DNA, 23 bp, Artificial Sequence
  Description of Artificial Sequence: Synthetic oligonucleotide
tgggaagaaaagcgtgggcgggg

SEQ ID NO: 8098 - DNA, 20 bp, Artificial Sequence
  Description of Artificial Sequence: Synthetic oligonucleotide
tgtcgtttcgaggttagacg

SEQ ID NO: 8099 - DNA, 22 bp, Artificial Sequence
  Description of Artificial Sequence: Synthetic oligonucleotide
aacgacatcttaaccgctaact

SEQ ID NO: 8100 - DNA, 19 bp, Artificial Sequence
  Description of Artificial Sequence: Synthetic oligonucleotide
ttacgtggggcgtttttat

SEQ ID NO: 8101 - DNA, 19 bp, Artificial Sequence
  Description of Artificial Sequence: Synthetic oligonucleotide
acgtcgtttcgtttggatt

SEQ ID NO: 8102 - DNA, 19 bp, Artificial Sequence
  Description of Artificial Sequence: Synthetic oligonucleotide
tacgtggggcgtttttatt

SEQ ID NO: 8103 - DNA, 22 bp, Artificial Sequence
  Description of Artificial Sequence: Synthetic oligonucleotide
cgatccaacgacaactacaact

SEQ ID NO: 8104 - DNA, 20 bp, Artificial Sequence
  Description of Artificial Sequence: Synthetic oligonucleotide
tttttcggatttgcgttatg

SEQ ID NO: 8105 - DNA, 22 bp, Artificial Sequence
  Description of Artificial Sequence: Synthetic oligonucleotide
cgaaacgataaaactaacctca

SEQ ID NO: 8106 - DNA, 33 bp, Artificial Sequence
  Description of Artificial Sequence: Synthetic oligonucleotide
ggggagaatcggttttttgttcgagtttagagt

SEQ ID NO: 8107 - DNA, 23 bp, Artificial Sequence
  Description of Artificial Sequence: Synthetic oligonucleotide
aattttgtattattcgcgttttt

SEQ ID NO: 8108 - DNA, 23 bp, Artificial Sequence
  Description of Artificial Sequence: Synthetic oligonucleotide
aattttaactttcaacgaaacga

SEQ ID NO: 8109 - DNA, 27 bp, Artificial Sequence
  Description of Artificial Sequence: Synthetic oligonucleotide
tgcgttatgcgcggcggggagaatcgg

SEQ ID NO: 8110 - DNA, 22 bp, Artificial Sequence
  Description of Artificial Sequence: Synthetic oligonucleotide
tattcgcgtttttagagttttt

SEQ ID NO: 8111 - DNA, 22 bp, Artificial Sequence
  Description of Artificial Sequence: Synthetic oligonucleotide
ttattcgcgtttttagagtttt

SEQ ID NO: 8112 - DNA, 23 bp, Artificial Sequence
  Description of Artificial Sequence: Synthetic oligonucleotide
acgaaacgataaaactaacctca

SEQ ID NO: 8113 - DNA, 22 bp, Artificial Sequence
  Description of Artificial Sequence: Synthetic oligonucleotide
acgacatcttaaccgctaacta

SEQ ID NO: 8114 - DNA, 19 bp, Artificial Sequence
  Description of Artificial Sequence: Synthetic oligonucleotide
cgtcgtttcgtttggattt

SEQ ID NO: 8115 - DNA, 22 bp, Artificial Sequence
  Description of Artificial Sequence: Synthetic oligonucleotide
attttgtattattcgcgttttt

SEQ ID NO: 8116 - DNA, 24 bp, Artificial Sequence
  Description of Artificial Sequence: Synthetic oligonucleotide
tttgtattattcgcgtttttagag

SEQ ID NO: 8117 - DNA, 22 bp, Artificial Sequence
  Description of Artificial Sequence: Synthetic oligonucleotide
attttaactttcaacgaaacga

SEQ ID NO: 8118 - DNA, 21 bp, Artificial Sequence
  Description of Artificial Sequence: Synthetic oligonucleotide
ggtgtcgtttcgaggttagac

SEQ ID NO: 8119 - DNA, 19 bp, Artificial Sequence
  Description of Artificial Sequence: Synthetic oligonucleotide
aaaaaccgtcgtccaaaaa

SEQ ID NO: 8120 - DNA, 31 bp, Artificial Sequence
  Description of Artificial Sequence: Synthetic oligonucleotide
ttgaatttgagtttgggacgggcgatttttt

SEQ ID NO: 8121 - DNA, 21 bp, Artificial Sequence
  Description of Artificial Sequence: Synthetic oligonucleotide
aaccgatccaacgacaactac

SEQ ID NO: 8122 - DNA, 25 bp, Artificial Sequence
  Description of Artificial Sequence: Synthetic oligonucleotide
ttttgtattattcgcgtttttagag

SEQ ID NO: 8123 - DNA, 21 bp, Artificial Sequence
  Description of Artificial Sequence: Synthetic oligonucleotide
ccactaacgacatcttaaccg

SEQ ID NO: 8124 - DNA, 23 bp, Artificial Sequence
  Description of Artificial Sequence: Synthetic oligonucleotide
attattcgcgtttttagagtttt

SEQ ID NO: 8125 - DNA, 23 bp, Artificial Sequence
  Description of Artificial Sequence: Synthetic oligonucleotide
taacgacatcttaaccgctaact

SEQ ID NO: 8126 - DNA, 23 bp, Artificial Sequence
  Description of Artificial Sequence: Synthetic oligonucleotide
ttgtattattcgcgtttttagag

SEQ ID NO: 8127 - DNA, 18 bp, Artificial Sequence
  Description of Artificial Sequence: Synthetic oligonucleotide
acgtggggcgtttttatt

SEQ ID NO: 8128 - DNA, 19 bp, Artificial Sequence
  Description of Artificial Sequence: Synthetic oligonucleotide
gaaaaaccgtcgtccaaaa

SEQ ID NO: 8129 - DNA, 24 bp, Artificial Sequence
  Description of Artificial Sequence: Synthetic oligonucleotide
taattttgtattattcgcgttttt

SEQ ID NO: 8130 - DNA, 21 bp, Artificial Sequence
  Description of Artificial Sequence: Synthetic oligonucleotide
aaaccgatccaacgacaacta

SEQ ID NO: 8131 - DNA, 20 bp, Artificial Sequence
  Description of Artificial Sequence: Synthetic oligonucleotide
accgatccaacgacaactac

SEQ ID NO: 8132 - DNA, 20 bp, Artificial Sequence
  Description of Artificial Sequence: Synthetic oligonucleotide
ggtgtcgtttcgaggttaga

SEQ ID NO: 8133 - DNA, 19 bp, Artificial Sequence
  Description of Artificial Sequence: Synthetic oligonucleotide
ctaccgaaaaaccgtcgtc

SEQ ID NO: 8134 - DNA, 19 bp, Artificial Sequence
  Description of Artificial Sequence: Synthetic oligonucleotide
ttttcggatttgcgttatg

SEQ ID NO: 8135 - DNA, 24 bp, Artificial Sequence
  Description of Artificial Sequence: Synthetic oligonucleotide
ctaacgacatcttaaccgctaact

SEQ ID NO: 8136 - DNA, 21 bp, Artificial Sequence
  Description of Artificial Sequence: Synthetic oligonucleotide
attcgcgtttttagagttttt

SEQ ID NO: 8137 - DNA, 25 bp, Artificial Sequence
  Description of Artificial Sequence: Synthetic oligonucleotide
cgacatcttaaccgctaactaaata

SEQ ID NO: 8138 - DNA, 22 bp, Artificial Sequence
  Description of Artificial Sequence: Synthetic oligonucleotide
cgatattttgagcgtcgttaat

SEQ ID NO: 8139 - DNA, 17 bp, Artificial Sequence
  Description of Artificial Sequence: Synthetic oligonucleotide
aaaaccgattctccccg

SEQ ID NO: 8140 - DNA, 33 bp, Artificial Sequence
  Description of Artificial Sequence: Synthetic oligonucleotide
attcgcgtttttagagttttttcggatttgcgt

SEQ ID NO: 8141 - DNA, 33 bp, Artificial Sequence
  Description of Artificial Sequence: Synthetic oligonucleotide
tgagtttgggacgggcgattttttaattttagg

SEQ ID NO: 8142 - DNA, 24 bp, Artificial Sequence
  Description of Artificial Sequence: Synthetic oligonucleotide
tattattcgcgtttttagagtttt

SEQ ID NO: 8143 - DNA, 21 bp, Artificial Sequence
  Description of Artificial Sequence: Synthetic oligonucleotide
gtgtcgtttcgaggttagacg

SEQ ID NO: 8144 - DNA, 25 bp, Artificial Sequence
  Description of Artificial Sequence: Synthetic oligonucleotide
ataattttgtattattcgcgttttt

SEQ ID NO: 8145 - DNA, 23 bp, Artificial Sequence
  Description of Artificial Sequence: Synthetic oligonucleotide
caacgaaacgataaaactaacct

SEQ ID NO: 8146 - DNA, 25 bp, Artificial Sequence
  Description of Artificial Sequence: Synthetic oligonucleotide
gtattattcgcgtttttagagtttt

SEQ ID NO: 8147 - DNA, 24 bp, Artificial Sequence
  Description of Artificial Sequence: Synthetic oligonucleotide
tcaacgaaacgataaaactaacct

SEQ ID NO: 8148 - DNA, 24 bp, Artificial Sequence
  Description of Artificial Sequence: Synthetic oligonucleotide
aacgaaacgataaaactaacctca

SEQ ID NO: 8149 - DNA, 18 bp, Artificial Sequence
  Description of Artificial Sequence: Synthetic oligonucleotide
ccctaccgaaaaaccgtc

SEQ ID NO: 8150 - DNA, 18 bp, Artificial Sequence
  Description of Artificial Sequence: Synthetic oligonucleotide
aaaaaccgattctccccg

SEQ ID NO: 8151 - DNA, 22 bp, Artificial Sequence
  Description of Artificial Sequence: Synthetic oligonucleotide
attttgagcgtcgttaattttt

SEQ ID NO: 8152 - DNA, 22 bp, Artificial Sequence
  Description of Artificial Sequence: Synthetic oligonucleotide
ctttcaacgaaacgataaaact

SEQ ID NO: 8153 - DNA, 21 bp, Artificial Sequence
  Description of Artificial Sequence: Synthetic oligonucleotide
ttttaactttcaacgaaacga

SEQ ID NO: 8154 - DNA, 21 bp, Artificial Sequence
  Description of Artificial Sequence: Synthetic oligonucleotide
acgacatcttaaccgctaact

SEQ ID NO: 8155 - DNA, 20 bp, Artificial Sequence
  Description of Artificial Sequence: Synthetic oligonucleotide
ccgatccaacgacaactaca

SEQ ID NO: 8156 - DNA, 19 bp, Artificial Sequence
  Description of Artificial Sequence: Synthetic oligonucleotide
tacccctaccgaaaaaccg

SEQ ID NO: 8157 - DNA, 22 bp, Artificial Sequence
  Description of Artificial Sequence: Synthetic oligonucleotide
aaattaaaatcccgaatacgaa

SEQ ID NO: 8158 - DNA, 22 bp, Artificial Sequence
  Description of Artificial Sequence: Synthetic oligonucleotide
tttgggaacgcgaataatatag

SEQ ID NO: 8159 - DNA, 39 bp, Artificial Sequence
  Description of Artificial Sequence: Synthetic oligonucleotide
tgttttattttgttatgtttttcggggaaaagttaacgg

SEQ ID NO: 8160 - DNA, 22 bp, Artificial Sequence
  Description of Artificial Sequence: Synthetic oligonucleotide
ctatattattcgcgttcccaaa

SEQ ID NO: 8161 - DNA, 23 bp, Artificial Sequence
  Description of Artificial Sequence: Synthetic oligonucleotide
gggttttaatttttaacgaaacg

SEQ ID NO: 8162 - DNA, 35 bp, Artificial Sequence
  Description of Artificial Sequence: Synthetic oligonucleotide
gtcggtttttttcgtcgcgtatggcgtaaattcga

SEQ ID NO: 8163 - DNA, 22 bp, Artificial Sequence
  Description of Artificial Sequence: Synthetic oligonucleotide
atcctatattattcgcgttccc

SEQ ID NO: 8164 - DNA, 23 bp, Artificial Sequence
  Description of Artificial Sequence: Synthetic oligonucleotide
cgtcgatttagggttttaatttt

SEQ ID NO: 8165 - DNA, 22 bp, Artificial Sequence
  Description of Artificial Sequence: Synthetic oligonucleotide
atattattcgcgttcccaaaat

SEQ ID NO: 8166 - DNA, 22 bp, Artificial Sequence
  Description of Artificial Sequence: Synthetic oligonucleotide
aacgtcgatttagggttttaat

SEQ ID NO: 8167 - DNA, 21 bp, Artificial Sequence
  Description of Artificial Sequence: Synthetic oligonucleotide
gggaacgcgaataatatagga

SEQ ID NO: 8168 - DNA, 23 bp, Artificial Sequence
  Description of Artificial Sequence: Synthetic oligonucleotide
taaattaaaatcccgaatacgaa

SEQ ID NO: 8169 - DNA, 21 bp, Artificial Sequence
  Description of Artificial Sequence: Synthetic oligonucleotide
tcctatattattcgcgttccc

SEQ ID NO: 8170 - DNA, 22 bp, Artificial Sequence
  Description of Artificial Sequence: Synthetic oligonucleotide
tatattattcgcgttcccaaaa

SEQ ID NO: 8171 - DNA, 21 bp, Artificial Sequence
  Description of Artificial Sequence: Synthetic oligonucleotide
aattcgagtaggaggtcggtt

SEQ ID NO: 8172 - DNA, 29 bp, Artificial Sequence
  Description of Artificial Sequence: Synthetic oligonucleotide
gtcgcgtatggcgtaaattcgaagggatt

SEQ ID NO: 8173 - DNA, 21 bp, Artificial Sequence
  Description of Artificial Sequence: Synthetic oligonucleotide
tattattcgcgttcccaaaat

SEQ ID NO: 8174 - DNA, 24 bp, Artificial Sequence
  Description of Artificial Sequence: Synthetic oligonucleotide
ataaattaaaatcccgaatacgaa

SEQ ID NO: 8175 - DNA, 24 bp, Artificial Sequence
  Description of Artificial Sequence: Synthetic oligonucleotide
aataaattaaaatcccgaatacga

SEQ ID NO: 8176 - DNA, 21 bp, Artificial Sequence
  Description of Artificial Sequence: Synthetic oligonucleotide
tatattattcgcgttcccaaa

SEQ ID NO: 8177 - DNA, 24 bp, Artificial Sequence
  Description of Artificial Sequence: Synthetic oligonucleotide
acgtcgatttagggttttaatttt

SEQ ID NO: 8178 - DNA, 21 bp, Artificial Sequence
  Description of Artificial Sequence: Synthetic oligonucleotide
cctatattattcgcgttccca

SEQ ID NO: 8179 - DNA, 22 bp, Artificial Sequence
  Description of Artificial Sequence: Synthetic oligonucleotide
ggttttaatttttaacgaaacg

SEQ ID NO: 8180 - DNA, 21 bp, Artificial Sequence
  Description of Artificial Sequence: Synthetic oligonucleotide
ttgggaacgcgaataatatag

SEQ ID NO: 8181 - DNA, 21 bp, Artificial Sequence
  Description of Artificial Sequence: Synthetic oligonucleotide
ctatattattcgcgttcccaa

SEQ ID NO: 8182 - DNA, 24 bp, Artificial Sequence
  Description of Artificial Sequence: Synthetic oligonucleotide
agggttttaatttttaacgaaacg

SEQ ID NO: 8183 - DNA, 23 bp, Artificial Sequence
  Description of Artificial Sequence: Synthetic oligonucleotide
tttaatttttaacgaaacgatga

SEQ ID NO: 8184 - DNA, 23 bp, Artificial Sequence
  Description of Artificial Sequence: Synthetic oligonucleotide
tttttaacgaaacgatgaaatta

SEQ ID NO: 8185 - DNA, 21 bp, Artificial Sequence
  Description of Artificial Sequence: Synthetic oligonucleotide
atattattcgcgttcccaaaa

SEQ ID NO: 8186 - DNA, 23 bp, Artificial Sequence
  Description of Artificial Sequence: Synthetic oligonucleotide
ttttgggaacgcgaataatatag

SEQ ID NO: 8187 - DNA, 20 bp, Artificial Sequence
  Description of Artificial Sequence: Synthetic oligonucleotide
attattcgcgttcccaaaat

SEQ ID NO: 8188 - DNA, 25 bp, Artificial Sequence
  Description of Artificial Sequence: Synthetic oligonucleotide
aaataaattaaaatcccgaatacga

SEQ ID NO: 8189 - DNA, 21 bp, Artificial Sequence
  Description of Artificial Sequence: Synthetic oligonucleotide
aattaaaatcccgaatacgaa

SEQ ID NO: 8190 - DNA, 20 bp, Artificial Sequence
  Description of Artificial Sequence: Synthetic oligonucleotide
ctacgccgcattaaaattcc

SEQ ID NO: 8191 - DNA, 19 bp, Artificial Sequence
  Description of Artificial Sequence: Synthetic oligonucleotide
tacgccgcattaaaattcc

SEQ ID NO: 8192 - DNA, 24 bp, Artificial Sequence
  Description of Artificial Sequence: Synthetic oligonucleotide
atttttaacgaaacgatgaaatta

SEQ ID NO: 8193 - DNA, 20 bp, Artificial Sequence
  Description of Artificial Sequence: Synthetic oligonucleotide
tattattcgcgttcccaaaa

SEQ ID NO: 8194 - DNA, 23 bp, Artificial Sequence
  Description of Artificial Sequence: Synthetic oligonucleotide
cgtttcgttaaaaattaaaaccc

SEQ ID NO: 8195 - DNA, 21 bp, Artificial Sequence
  Description of Artificial Sequence: Synthetic oligonucleotide
gtttcgaggcggtattttagg

SEQ ID NO: 8196 - DNA, 24 bp, Artificial Sequence
  Description of Artificial Sequence: Synthetic oligonucleotide
gggtaggcggttggggaacgtcga

SEQ ID NO: 8197 - DNA, 21 bp, Artificial Sequence
  Description of Artificial Sequence: Synthetic oligonucleotide
cgaggcggtattttagggtag

SEQ ID NO: 8198 - DNA, 19 bp, Artificial Sequence
  Description of Artificial Sequence: Synthetic oligonucleotide
attttgggaacgcgaataa

SEQ ID NO: 8199 - DNA, 25 bp, Artificial Sequence
  Description of Artificial Sequence: Synthetic oligonucleotide
tagggttttaatttttaacgaaacg

SEQ ID NO: 8200 - DNA, 19 bp, Artificial Sequence
  Description of Artificial Sequence: Synthetic oligonucleotide
ttattcgcgttcccaaaat

SEQ ID NO: 8201 - DNA, 19 bp, Artificial Sequence
  Description of Artificial Sequence: Synthetic oligonucleotide
ttcgaggcggtattttagg

SEQ ID NO: 8202 - DNA, 20 bp, Artificial Sequence
  Description of Artificial Sequence: Synthetic oligonucleotide
tttcgaggcggtattttagg

SEQ ID NO: 8203 - DNA, 20 bp, Artificial Sequence
  Description of Artificial Sequence: Synthetic oligonucleotide
actacgccacgtaaaacgct

SEQ ID NO: 8204 - DNA, 22 bp, Artificial Sequence
  Description of Artificial Sequence: Synthetic oligonucleotide
tagcgataattgtagttggacg

SEQ ID NO: 8205 - DNA, 30 bp, Artificial Sequence
  Description of Artificial Sequence: Synthetic oligonucleotide
gtaacgcggaggggagggattgtttcggtt

SEQ ID NO: 8206 - DNA, 19 bp, Artificial Sequence
  Description of Artificial Sequence: Synthetic oligonucleotide
tattcgcgttcccaaaatc

SEQ ID NO: 8207 - DNA, 25 bp, Artificial Sequence
  Description of Artificial Sequence: Synthetic oligonucleotide
ggttttaatttttaacgaaacgatg

SEQ ID NO: 8208 - DNA, 18 bp, Artificial Sequence
  Description of Artificial Sequence: Synthetic oligonucleotide
acgccgcattaaaattcc

SEQ ID NO: 8209 - DNA, 19 bp, Artificial Sequence
  Description of Artificial Sequence: Synthetic oligonucleotide
aaacgaacgatttcccaac

SEQ ID NO: 8210 - DNA, 23 bp, Artificial Sequence
  Description of Artificial Sequence: Synthetic oligonucleotide
tttattgacgatattttggtcgt

SEQ ID NO: 8211 - DNA, 33 bp, Artificial Sequence
  Description of Artificial Sequence: Synthetic oligonucleotide
gtcgtttaggaaacgcgtttaggttttggtgtt

SEQ ID NO: 8212 - DNA, 19 bp, Artificial Sequence
  Description of Artificial Sequence: Synthetic oligonucleotide
cacgtaaaacgctcccatt

SEQ ID NO: 8213 - DNA, 22 bp, Artificial Sequence
  Description of Artificial Sequence: Synthetic oligonucleotide
tagttagggtcggtttagcgat

SEQ ID NO: 8214 - DNA, 19 bp, Artificial Sequence
  Description of Artificial Sequence: Synthetic oligonucleotide
aatttacgccatacgcgac

SEQ ID NO: 8215 - DNA, 32 bp, Artificial Sequence
  Description of Artificial Sequence: Synthetic oligonucleotide
agatgagttttgaattcgagtaggaggtcggt

SEQ ID NO: 8216 - DNA, 19 bp, Artificial Sequence
  Description of Artificial Sequence: Synthetic oligonucleotide
ctacgccacgtaaaacgct

SEQ ID NO: 8217 - DNA, 22 bp, Artificial Sequence
  Description of Artificial Sequence: Synthetic oligonucleotide
ttaaaaccctaaatcgacgttc

SEQ ID NO: 8218 - DNA, 18 bp, Artificial Sequence
  Description of Artificial Sequence: Synthetic oligonucleotide
ggttgggaaatcgttcgt

SEQ ID NO: 8219 - DNA, 30 bp, Artificial Sequence
  Description of Artificial Sequence: Synthetic oligonucleotide
gacgtttggtttcgaggcggtattttaggg

SEQ ID NO: 8220 - DNA, 18 bp, Artificial Sequence
  Description of Artificial Sequence: Synthetic oligonucleotide
tacgccacgtaaaacgct

SEQ ID NO: 8221 - DNA, 19 bp, Artificial Sequence
  Description of Artificial Sequence: Synthetic oligonucleotide
aggttgggaaatcgttcgt

SEQ ID NO: 8222 - DNA, 19 bp, Artificial Sequence
  Description of Artificial Sequence: Synthetic oligonucleotide
attattcgcgttcccaaaa

SEQ ID NO: 8223 - DNA, 22 bp, Artificial Sequence
  Description of Artificial Sequence: Synthetic oligonucleotide
ggaacgtcgatttagggtttta

SEQ ID NO: 8224 - DNA, 21 bp, Artificial Sequence
  Description of Artificial Sequence: Synthetic oligonucleotide
tttcactacgccacgtaaaac

SEQ ID NO: 8225 - DNA, 20 bp, Artificial Sequence
  Description of Artificial Sequence: Synthetic oligonucleotide
tggtttttaaggtaacgcgg

SEQ ID NO: 8226 - DNA, 29 bp, Artificial Sequence
  Description of Artificial Sequence: Synthetic oligonucleotide
gggagggattgtttcggtttcgtttacgt

SEQ ID NO: 8227 - DNA, 22 bp, Artificial Sequence
  Description of Artificial Sequence: Synthetic oligonucleotide
ttattgacgatattttggtcgt

SEQ ID NO: 8228 - DNA, 20 bp, Artificial Sequence
  Description of Artificial Sequence: Synthetic oligonucleotide
cgtaaaacgctcccattact

SEQ ID NO: 8229 - DNA, 20 bp, Artificial Sequence
  Description of Artificial Sequence: Synthetic oligonucleotide
gttagggtcggtttagcgat

SEQ ID NO: 8230 - DNA, 19 bp, Artificial Sequence
  Description of Artificial Sequence: Synthetic oligonucleotide
acgaacgatttcccaacct

SEQ ID NO: 8231 - DNA, 22 bp, Artificial Sequence
  Description of Artificial Sequence: Synthetic oligonucleotide
attgacgatattttggtcgttg

SEQ ID NO: 8232 - DNA, 22 bp, Artificial Sequence
  Description of Artificial Sequence: Synthetic oligonucleotide
tttatcggtgtcggtagttttc

SEQ ID NO: 8233 - DNA, 22 bp, Artificial Sequence
  Description of Artificial Sequence: Synthetic oligonucleotide
ccaatcctatccgtaataaacg

SEQ ID NO: 8234 - DNA, 24 bp, Artificial Sequence
  Description of Artificial Sequence: Synthetic oligonucleotide
tttgtcggagggcgattcgtgggt

SEQ ID NO: 8235 - DNA, 22 bp, Artificial Sequence
  Description of Artificial Sequence: Synthetic oligonucleotide
ttttatcggtgtcggtagtttt

SEQ ID NO: 8236 - DNA, 22 bp, Artificial Sequence
  Description of Artificial Sequence: Synthetic oligonucleotide
gattttatcggtgtcggtagtt

SEQ ID NO: 8237 - DNA, 23 bp, Artificial Sequence
  Description of Artificial Sequence: Synthetic oligonucleotide
attttatcggtgtcggtagtttt

SEQ ID NO: 8238 - DNA, 22 bp, Artificial Sequence
  Description of Artificial Sequence: Synthetic oligonucleotide
ggattttatcggtgtcggtagt

SEQ ID NO: 8239 - DNA, 22 bp, Artificial Sequence
  Description of Artificial Sequence: Synthetic oligonucleotide
caatcctatccgtaataaacga

SEQ ID NO: 8240 - DNA, 21 bp, Artificial Sequence
  Description of Artificial Sequence: Synthetic oligonucleotide
ccgtaataaacgatacccacg

SEQ ID NO: 8241 - DNA, 31 bp, Artificial Sequence
  Description of Artificial Sequence: Synthetic oligonucleotide
ggttttcgggtatagcggtcgttttattcga

SEQ ID NO: 8242 - DNA, 23 bp, Artificial Sequence
  Description of Artificial Sequence: Synthetic oligonucleotide
cgtaataaacgatacccacgaat

SEQ ID NO: 8243 - DNA, 23 bp, Artificial Sequence
  Description of Artificial Sequence: Synthetic oligonucleotide
tccaatcctatccgtaataaacg

SEQ ID NO: 8244 - DNA, 21 bp, Artificial Sequence
  Description of Artificial Sequence: Synthetic oligonucleotide
ttatcggtgtcggtagttttc

SEQ ID NO: 8245 - DNA, 22 bp, Artificial Sequence
  Description of Artificial Sequence: Synthetic oligonucleotide
tatttgcgttttcgttagtttt

SEQ ID NO: 8246 - DNA, 22 bp, Artificial Sequence
  Description of Artificial Sequence: Synthetic oligonucleotide
atccgtaataaacgatacccac

SEQ ID NO: 8247 - DNA, 24 bp, Artificial Sequence
  Description of Artificial Sequence: Synthetic oligonucleotide
tgcgtttgtaattttagttattcg

SEQ ID NO: 8248 - DNA, 22 bp, Artificial Sequence
  Description of Artificial Sequence: Synthetic oligonucleotide
taacgcgatctctaacccacta

SEQ ID NO: 8249 - DNA, 32 bp, Artificial Sequence
  Description of Artificial Sequence: Synthetic oligonucleotide
ggttgaagtaggagaatcgcgtgaatttagga

SEQ ID NO: 8250 - DNA, 20 bp, Artificial Sequence
  Description of Artificial Sequence: Synthetic oligonucleotide
gtgtcggtagttttcgggtt

SEQ ID NO: 8251 - DNA, 24 bp, Artificial Sequence
  Description of Artificial Sequence: Synthetic oligonucleotide
cgtttgtaattttagttattcggg

SEQ ID NO: 8252 - DNA, 22 bp, Artificial Sequence
  Description of Artificial Sequence: Synthetic oligonucleotide
ataacgcgatctctaacccact

SEQ ID NO: 8253 - DNA, 19 bp, Artificial Sequence
  Description of Artificial Sequence: Synthetic oligonucleotide
tgtcggtagttttcgggtt

SEQ ID NO: 8254 - DNA, 22 bp, Artificial Sequence
  Description of Artificial Sequence: Synthetic oligonucleotide
attttatcggtgtcggtagttt

SEQ ID NO: 8255 - DNA, 24 bp, Artificial Sequence
  Description of Artificial Sequence: Synthetic oligonucleotide
gcgtttgtaattttagttattcgg

SEQ ID NO: 8256 - DNA, 23 bp, Artificial Sequence
  Description of Artificial Sequence: Synthetic oligonucleotide
atatttgcgttttcgttagtttt

SEQ ID NO: 8257 - DNA, 21 bp, Artificial Sequence
  Description of Artificial Sequence: Synthetic oligonucleotide
acgcgatctctaacccactac

SEQ ID NO: 8258 - DNA, 21 bp, Artificial Sequence
  Description of Artificial Sequence: Synthetic oligonucleotide
ggattttatcggtgtcggtag

SEQ ID NO: 8259 - DNA, 23 bp, Artificial Sequence
  Description of Artificial Sequence: Synthetic oligonucleotide
gattttatcggtgtcggtagttt

SEQ ID NO: 8260 - DNA, 22 bp, Artificial Sequence
  Description of Artificial Sequence: Synthetic oligonucleotide
tgtttggacgaattatcgtatt

SEQ ID NO: 8261 - DNA, 21 bp, Artificial Sequence
  Description of Artificial Sequence: Synthetic oligonucleotide
cgaaacataaaaacaacgcct

SEQ ID NO: 8262 - DNA, 24 bp, Artificial Sequence
  Description of Artificial Sequence: Synthetic oligonucleotide
ttcgggaggcgcgtataggtgggt

SEQ ID NO: 8263 - DNA, 20 bp, Artificial Sequence
  Description of Artificial Sequence: Synthetic oligonucleotide
aagtaggagaatcgcgtgaa

SEQ ID NO: 8264 - DNA, 21 bp, Artificial Sequence
  Description of Artificial Sequence: Synthetic oligonucleotide
ctaaaaatcgcccgaactaaa

SEQ ID NO: 8265 - DNA, 38 bp, Artificial Sequence
  Description of Artificial Sequence: Synthetic oligonucleotide
ggcgtaggttgtagtgggttagagatcgcgttattgtt

SEQ ID NO: 8266 - DNA, 22 bp, Artificial Sequence
  Description of Artificial Sequence: Synthetic oligonucleotide
aacgcgatctctaacccactac

SEQ ID NO: 8267 - DNA, 21 bp, Artificial Sequence
  Description of Artificial Sequence: Synthetic oligonucleotide
gaagtaggagaatcgcgtgaa

SEQ ID NO: 8268 - DNA, 21 bp, Artificial Sequence
  Description of Artificial Sequence: Synthetic oligonucleotide
taacgcgatctctaacccact

SEQ ID NO: 8269 - DNA, 19 bp, Artificial Sequence
  Description of Artificial Sequence: Synthetic oligonucleotide
tcggtagttttcgggtttt

SEQ ID NO: 8270 - DNA, 19 bp, Artificial Sequence
  Description of Artificial Sequence: Synthetic oligonucleotide
gttttcgggtatagcggtc

SEQ ID NO: 8271 - DNA, 21 bp, Artificial Sequence
  Description of Artificial Sequence: Synthetic oligonucleotide
taaaaatcgcccgaactaaaa

SEQ ID NO: 8272 - DNA, 38 bp, Artificial Sequence
  Description of Artificial Sequence: Synthetic oligonucleotide
ttaggaggcgtaggttgtagtgggttagagatcgcgtt

SEQ ID NO: 8273 - DNA, 25 bp, Artificial Sequence
  Description of Artificial Sequence: Synthetic oligonucleotide
gtgcgtttgtaattttagttattcg

SEQ ID NO: 8274 - DNA, 22 bp, Artificial Sequence
  Description of Artificial Sequence: Synthetic oligonucleotide
cgttgtttttatgtttcgagag

SEQ ID NO: 8275 - DNA, 19 bp, Artificial Sequence
  Description of Artificial Sequence: Synthetic oligonucleotide
gtcacttccgaaatccgac

SEQ ID NO: 8276 - DNA, 30 bp, Artificial Sequence
  Description of Artificial Sequence: Synthetic oligonucleotide
tggttcgcggagtttcgtttagttaggtga

SEQ ID NO: 8277 - DNA, 22 bp, Artificial Sequence
  Description of Artificial Sequence: Synthetic oligonucleotide
aatgtaggtgcgcgttatattt

SEQ ID NO: 8278 - DNA, 18 bp, Artificial Sequence
  Description of Artificial Sequence: Synthetic oligonucleotide
ctcccgaaatacgctcct

SEQ ID NO: 8279 - DNA, 40 bp, Artificial Sequence
  Description of Artificial Sequence: Synthetic oligonucleotide
tgtttggacgaattatcgtattttttgttttaggagtttt

SEQ ID NO: 8280 - DNA, 20 bp, Artificial Sequence
  Description of Artificial Sequence: Synthetic oligonucleotide
atcggtgtcggtagttttcg

SEQ ID NO: 8281 - DNA, 22 bp, Artificial Sequence
  Description of Artificial Sequence: Synthetic oligonucleotide
tatagcggtcgttttattcgat

SEQ ID NO: 8282 - DNA, 18 bp, Artificial Sequence
  Description of Artificial Sequence: Synthetic oligonucleotide
acatctccgcgatctcct

SEQ ID NO: 8283 - DNA, 34 bp, Artificial Sequence
  Description of Artificial Sequence: Synthetic oligonucleotide
ttcgtgggtatcgtttattacggataggattgga

SEQ ID NO: 8284 - DNA, 21 bp, Artificial Sequence
  Description of Artificial Sequence: Synthetic oligonucleotide
tccgtaataaacgatacccac

SEQ ID NO: 8285 - DNA, 18 bp, Artificial Sequence
  Description of Artificial Sequence: Synthetic oligonucleotide
cgaaatacgctccttccc

SEQ ID NO: 8286 - DNA, 18 bp, Artificial Sequence
  Description of Artificial Sequence: Synthetic oligonucleotide
ccgaaatacgctccttcc

SEQ ID NO: 8287 - DNA, 18 bp, Artificial Sequence
  Description of Artificial Sequence: Synthetic oligonucleotide
tcccgaaatacgctcctt

SEQ ID NO: 8288 - DNA, 18 bp, Artificial Sequence
  Description of Artificial Sequence: Synthetic oligonucleotide
cccgaaatacgctccttc

SEQ ID NO: 8289 - DNA, 23 bp, Artificial Sequence
  Description of Artificial Sequence: Synthetic oligonucleotide
ttttatcggtgtcggtagttttc

SEQ ID NO: 8290 - DNA, 28 bp, Artificial Sequence
  Description of Artificial Sequence: Synthetic oligonucleotide
ttatttttgtcggagggcgattcgtggg

SEQ ID NO: 8291 - DNA, 20 bp, Artificial Sequence
  Description of Artificial Sequence: Synthetic oligonucleotide
cgtaataaacgatacccacg

SEQ ID NO: 8292 - DNA, 20 bp, Artificial Sequence
  Description of Artificial Sequence: Synthetic oligonucleotide
tgaagtaggagaatcgcgtg

SEQ ID NO: 8293 - DNA, 21 bp, Artificial Sequence
  Description of Artificial Sequence: Synthetic oligonucleotide
gcgttgtttttatgtttcgag

SEQ ID NO: 8294 - DNA, 22 bp, Artificial Sequence
  Description of Artificial Sequence: Synthetic oligonucleotide
tttggacgaattatcgtatttt

SEQ ID NO: 8295 - DNA, 18 bp, Artificial Sequence
  Description of Artificial Sequence: Synthetic oligonucleotide
cggtgtcggtagttttcg

SEQ ID NO: 8296 - DNA, 19 bp, Artificial Sequence
  Description of Artificial Sequence: Synthetic oligonucleotide
tgggattttatcggtgtcg

SEQ ID NO: 8297 - DNA, 23 bp, Artificial Sequence
  Description of Artificial Sequence: Synthetic oligonucleotide
gtttggacgaattatcgtatttt

SEQ ID NO: 8298 - DNA, 22 bp, Artificial Sequence
  Description of Artificial Sequence: Synthetic oligonucleotide
ggtgcgcgttatatttattttt

SEQ ID NO: 8299 - DNA, 18 bp, Artificial Sequence
  Description of Artificial Sequence: Synthetic oligonucleotide
atctccgcgatctcctct

SEQ ID NO: 8300 - DNA, 34 bp, Artificial Sequence
  Description of Artificial Sequence: Synthetic oligonucleotide
attcgtgggtatcgtttattacggataggattgg

SEQ ID NO: 8301 - DNA, 22 bp, Artificial Sequence
  Description of Artificial Sequence: Synthetic oligonucleotide
gtttttatgtttcgagaggcgt

SEQ ID NO: 8302 - DNA, 20 bp, Artificial Sequence
  Description of Artificial Sequence: Synthetic oligonucleotide
cgcgatctctaacccactac

SEQ ID NO: 8303 - DNA, 18 bp, Artificial Sequence
  Description of Artificial Sequence: Synthetic oligonucleotide
aacatctccgcgatctcc

SEQ ID NO: 8304 - DNA, 21 bp, Artificial Sequence
  Description of Artificial Sequence: Synthetic oligonucleotide
atttaacctaaaaatcgcccg

SEQ ID NO: 8305 - DNA, 21 bp, Artificial Sequence
  Description of Artificial Sequence: Synthetic oligonucleotide
tttttatgtttcgagaggcgt

SEQ ID NO: 8306 - DNA, 22 bp, Artificial Sequence
  Description of Artificial Sequence: Synthetic oligonucleotide
cgtttattacggataggattgg

SEQ ID NO: 8307 - DNA, 18 bp, Artificial Sequence
  Description of Artificial Sequence: Synthetic oligonucleotide
gctacgcgacgacaaaaa

SEQ ID NO: 8308 - DNA, 33 bp, Artificial Sequence
  Description of Artificial Sequence: Synthetic oligonucleotide
tgtttgaggtagaagttcggaaattcgagttgt

SEQ ID NO: 8309 - DNA, 19 bp, Artificial Sequence
  Description of Artificial Sequence: Synthetic oligonucleotide
aacatctccgcgatctcct

SEQ ID NO: 8310 - DNA, 22 bp, Artificial Sequence
  Description of Artificial Sequence: Synthetic oligonucleotide
aggtgcgcgttatatttatttt

SEQ ID NO: 8311 - DNA, 19 bp, Artificial Sequence
  Description of Artificial Sequence: Synthetic oligonucleotide
tcggtgtcggtagttttcg

SEQ ID NO: 8312 - DNA, 20 bp, Artificial Sequence
  Description of Artificial Sequence: Synthetic oligonucleotide
tatcggtgtcggtagttttc

SEQ ID NO: 8313 - DNA, 20 bp, Artificial Sequence
  Description of Artificial Sequence: Synthetic oligonucleotide
aaaatcgcccgaactaaaaa

SEQ ID NO: 8314 - DNA, 20 bp, Artificial Sequence
  Description of Artificial Sequence: Synthetic oligonucleotide
aaaaatcgcccgaactaaaa

SEQ ID NO: 8315 - DNA, 22 bp, Artificial Sequence
  Description of Artificial Sequence: Synthetic oligonucleotide
gggtatagcggtcgttttattc

SEQ ID NO: 8316 - DNA, 18 bp, Artificial Sequence
  Description of Artificial Sequence: Synthetic oligonucleotide
tctccgcgatctcctctc

SEQ ID NO: 8317 - DNA, 21 bp, Artificial Sequence
  Description of Artificial Sequence: Synthetic oligonucleotide
gattttatcggtgtcggtagt

SEQ ID NO: 8318 - DNA, 18 bp, Artificial Sequence
  Description of Artificial Sequence: Synthetic oligonucleotide
ggatttcggaagtgacgc

SEQ ID NO: 8319 - DNA, 22 bp, Artificial Sequence
  Description of Artificial Sequence: Synthetic oligonucleotide
ctacaaccgaacctactcgaac

SEQ ID NO: 8320 - DNA, 28 bp, Artificial Sequence
  Description of Artificial Sequence: Synthetic oligonucleotide
agtcggtttggggggtgcgttgttcgga

SEQ ID NO: 8321 - DNA, 22 bp, Artificial Sequence
  Description of Artificial Sequence: Synthetic oligonucleotide
tacaaccgaacctactcgaact

SEQ ID NO: 8322 - DNA, 21 bp, Artificial Sequence
  Description of Artificial Sequence: Synthetic oligonucleotide
aggcgttgtttttatgtttcg

SEQ ID NO: 8323 - DNA, 23 bp, Artificial Sequence
  Description of Artificial Sequence: Synthetic oligonucleotide
tgtaggtgcgcgttatatttatt

SEQ ID NO: 8324 - DNA, 20 bp, Artificial Sequence
  Description of Artificial Sequence: Synthetic oligonucleotide
ggcgttgtttttatgtttcg

SEQ ID NO: 8325 - DNA, 21 bp, Artificial Sequence
  Description of Artificial Sequence: Synthetic oligonucleotide
tcgaaacataaaaacaacgcc

SEQ ID NO: 8326 - DNA, 21 bp, Artificial Sequence
  Description of Artificial Sequence: Synthetic oligonucleotide
acctaaaaatcgcccgaacta

SEQ ID NO: 8327 - DNA, 20 bp, Artificial Sequence
  Description of Artificial Sequence: Synthetic oligonucleotide
tatgtttcgagaggcgtgtt

SEQ ID NO: 8328 - DNA, 20 bp, Artificial Sequence
  Description of Artificial Sequence: Synthetic oligonucleotide
ttatgtttcgagaggcgtgt

SEQ ID NO: 8329 - DNA, 21 bp, Artificial Sequence
  Description of Artificial Sequence: Synthetic oligonucleotide
cggtcgttttattcgattttt

SEQ ID NO: 8330 - DNA, 21 bp, Artificial Sequence
  Description of Artificial Sequence: Synthetic oligonucleotide
atagcggtcgttttattcgat

SEQ ID NO: 8331 - DNA, 18 bp, Artificial Sequence
  Description of Artificial Sequence: Synthetic oligonucleotide
catctccgcgatctcctc

SEQ ID NO: 8332 - DNA, 20 bp, Artificial Sequence
  Description of Artificial Sequence: Synthetic oligonucleotide
tttaacctaaaaatcgcccg

SEQ ID NO: 8333 - DNA, 20 bp, Artificial Sequence
  Description of Artificial Sequence: Synthetic oligonucleotide
ttttatgtttcgagaggcgt

SEQ ID NO: 8334 - DNA, 19 bp, Artificial Sequence
  Description of Artificial Sequence: Synthetic oligonucleotide
ttaacctaaaaatcgcccg

SEQ ID NO: 8335 - DNA, 20 bp, Artificial Sequence
  Description of Artificial Sequence: Synthetic oligonucleotide
cctaaaaatcgcccgaacta

SEQ ID NO: 8336 - DNA, 21 bp, Artificial Sequence
  Description of Artificial Sequence: Synthetic oligonucleotide
ctacgtctccgtcaatttcct

SEQ ID NO: 8337 - DNA, 22 bp, Artificial Sequence
  Description of Artificial Sequence: Synthetic oligonucleotide
attttattcgtgatggacgatg

SEQ ID NO: 8338 - DNA, 24 bp, Artificial Sequence
  Description of Artificial Sequence: Synthetic oligonucleotide
aggggagtcggatgagacggtcgt

SEQ ID NO: 8339 - DNA, 22 bp, Artificial Sequence
  Description of Artificial Sequence: Synthetic oligonucleotide
atctacgtctccgtcaatttcc

SEQ ID NO: 8340 - DNA, 21 bp, Artificial Sequence
  Description of Artificial Sequence: Synthetic oligonucleotide
aatccacatctacgtctccgt

SEQ ID NO: 8341 - DNA, 22 bp, Artificial Sequence
  Description of Artificial Sequence: Synthetic oligonucleotide
attcgtgatggacgatgtttac

SEQ ID NO: 8342 - DNA, 23 bp, Artificial Sequence
  Description of Artificial Sequence: Synthetic oligonucleotide
tttaattttattcgtgatggacg

SEQ ID NO: 8343 - DNA, 22 bp, Artificial Sequence
  Description of Artificial Sequence: Synthetic oligonucleotide
ttaattttattcgtgatggacg

SEQ ID NO: 8344 - DNA, 22 bp, Artificial Sequence
  Description of Artificial Sequence: Synthetic oligonucleotide
gtgatggacgatgtttacgagt

SEQ ID NO: 8345 - DNA, 21 bp, Artificial Sequence
  Description of Artificial Sequence: Synthetic oligonucleotide
tattcgtgatggacgatgttt

SEQ ID NO: 8346 - DNA, 21 bp, Artificial Sequence
  Description of Artificial Sequence: Synthetic oligonucleotide
tgatggacgatgtttacgagt

SEQ ID NO: 8347 - DNA, 22 bp, Artificial Sequence
  Description of Artificial Sequence: Synthetic oligonucleotide
aaatccacatctacgtctccgt

SEQ ID NO: 8348 - DNA, 21 bp, Artificial Sequence
  Description of Artificial Sequence: Synthetic oligonucleotide
ttttattcgtgatggacgatg

SEQ ID NO: 8349 - DNA, 21 bp, Artificial Sequence
  Description of Artificial Sequence: Synthetic oligonucleotide
tacgtctccgtcaatttcctc

SEQ ID NO: 8350 - DNA, 21 bp, Artificial Sequence
  Description of Artificial Sequence: Synthetic oligonucleotide
tctacgtctccgtcaatttcc

SEQ ID NO: 8351 - DNA, 21 bp, Artificial Sequence
  Description of Artificial Sequence: Synthetic oligonucleotide
ttcgtgatggacgatgtttac

SEQ ID NO: 8352 - DNA, 21 bp, Artificial Sequence
  Description of Artificial Sequence: Synthetic oligonucleotide
cgtctccgtcaatttcctcta

SEQ ID NO: 8353 - DNA, 21 bp, Artificial Sequence
  Description of Artificial Sequence: Synthetic oligonucleotide
cgacgaacaaccaataacaca

SEQ ID NO: 8354 - DNA, 22 bp, Artificial Sequence
  Description of Artificial Sequence: Synthetic oligonucleotide
gaaattgacggagacgtagatg

SEQ ID NO: 8355 - DNA, 25 bp, Artificial Sequence
  Description of Artificial Sequence: Synthetic oligonucleotide
tgtagcggaggaaggcgaggtagga

SEQ ID NO: 8356 - DNA, 20 bp, Artificial Sequence
  Description of Artificial Sequence: Synthetic oligonucleotide
aacacaacgaccgtctcatc

SEQ ID NO: 8357 - DNA, 22 bp, Artificial Sequence
  Description of Artificial Sequence: Synthetic oligonucleotide
gtagttcgggttttcgagtttt

SEQ ID NO: 8358 - DNA, 31 bp, Artificial Sequence
  Description of Artificial Sequence: Synthetic oligonucleotide
attcgtgatggacgatgtttacgagtcgttt

SEQ ID NO: 8359 - DNA, 20 bp, Artificial Sequence
  Description of Artificial Sequence: Synthetic oligonucleotide
gaacacaacgaccgtctcat

SEQ ID NO: 8360 - DNA, 20 bp, Artificial Sequence
  Description of Artificial Sequence: Synthetic oligonucleotide
cgtctccgtcaatttcctct

SEQ ID NO: 8361 - DNA, 22 bp, Artificial Sequence
  Description of Artificial Sequence: Synthetic oligonucleotide
tattcgtgatggacgatgttta

SEQ ID NO: 8362 - DNA, 21 bp, Artificial Sequence
  Description of Artificial Sequence: Synthetic oligonucleotide
tttattcgtgatggacgatgt

SEQ ID NO: 8363 - DNA, 21 bp, Artificial Sequence
  Description of Artificial Sequence: Synthetic oligonucleotide
tagttcgggttttcgagtttt

SEQ ID NO: 8364 - DNA, 22 bp, Artificial Sequence
  Description of Artificial Sequence: Synthetic oligonucleotide
ttattcgtgatggacgatgttt

SEQ ID NO: 8365 - DNA, 22 bp, Artificial Sequence
  Description of Artificial Sequence: Synthetic oligonucleotide
ttttattcgtgatggacgatgt

SEQ ID NO: 8366 - DNA, 19 bp, Artificial Sequence
  Description of Artificial Sequence: Synthetic oligonucleotide
aatcgcgtaaacccaaaaa

SEQ ID NO: 8367 - DNA, 22 bp, Artificial Sequence
  Description of Artificial Sequence: Synthetic oligonucleotide
atttaatttgagagtcgttcgg

SEQ ID NO: 8368 - DNA, 30 bp, Artificial Sequence
  Description of Artificial Sequence: Synthetic oligonucleotide
gggttggagaataatggcgcgatttttggt

SEQ ID NO: 8369 - DNA, 19 bp, Artificial Sequence
  Description of Artificial Sequence: Synthetic oligonucleotide
aaatcgcgtaaacccaaaa

SEQ ID NO: 8370 - DNA, 20 bp, Artificial Sequence
  Description of Artificial Sequence: Synthetic oligonucleotide
cgacgaacaaccaataacac

SEQ ID NO: 8371 - DNA, 22 bp, Artificial Sequence
  Description of Artificial Sequence: Synthetic oligonucleotide
aaattgacggagacgtagatgt

SEQ ID NO: 8372 - DNA, 20 bp, Artificial Sequence
  Description of Artificial Sequence: Synthetic oligonucleotide
actaaccaaaaacccgacga

SEQ ID NO: 8373 - DNA, 21 bp, Artificial Sequence
  Description of Artificial Sequence: Synthetic oligonucleotide
gtgtagttcgggttttcgagt

SEQ ID NO: 8374 - DNA, 20 bp, Artificial Sequence
  Description of Artificial Sequence: Synthetic oligonucleotide
atccacatctacgtctccgt

SEQ ID NO: 8375 - DNA, 21 bp, Artificial Sequence
  Description of Artificial Sequence: Synthetic oligonucleotide
aggaaattgacggagacgtag

SEQ ID NO: 8376 - DNA, 19 bp, Artificial Sequence
  Description of Artificial Sequence: Synthetic oligonucleotide
ctaaccaaaaacccgacga

SEQ ID NO: 8377 - DNA, 20 bp, Artificial Sequence
  Description of Artificial Sequence: Synthetic oligonucleotide
acgtctccgtcaatttcctc

SEQ ID NO: 8378 - DNA, 22 bp, Artificial Sequence
  Description of Artificial Sequence: Synthetic oligonucleotide
ggaaattgacggagacgtagat

SEQ ID NO: 8379 - DNA, 20 bp, Artificial Sequence
  Description of Artificial Sequence: Synthetic oligonucleotide
aaaatcgcgtaaacccaaaa

SEQ ID NO: 8380 - DNA, 31 bp, Artificial Sequence
  Description of Artificial Sequence: Synthetic oligonucleotide
ggttggagaataatggcgcgatttttggttt

SEQ ID NO: 8381 - DNA, 19 bp, Artificial Sequence
  Description of Artificial Sequence: Synthetic oligonucleotide
acccgacgaacaaccaata

SEQ ID NO: 8382 - DNA, 20 bp, Artificial Sequence
  Description of Artificial Sequence: Synthetic oligonucleotide
taaccaaaaacccgacgaac

SEQ ID NO: 8383 - DNA, 20 bp, Artificial Sequence
  Description of Artificial Sequence: Synthetic oligonucleotide
ccgacgaacaaccaataaca

SEQ ID NO: 8384 - DNA, 22 bp, Artificial Sequence
  Description of Artificial Sequence: Synthetic oligonucleotide
gagttttggtcgtcgataagag

SEQ ID NO: 8385 - DNA, 20 bp, Artificial Sequence
  Description of Artificial Sequence: Synthetic oligonucleotide
acgaaacgcaaactacgaac

SEQ ID NO: 8386 - DNA, 28 bp, Artificial Sequence
  Description of Artificial Sequence: Synthetic oligonucleotide
ggacgtcggttttcgttttgttcgaggt

SEQ ID NO: 8387 - DNA, 22 bp, Artificial Sequence
  Description of Artificial Sequence: Synthetic oligonucleotide
gatagtagagatcgttcgtggg

SEQ ID NO: 8388 - DNA, 21 bp, Artificial Sequence
  Description of Artificial Sequence: Synthetic oligonucleotide
tccaaaactccgactataccg

SEQ ID NO: 8389 - DNA, 33 bp, Artificial Sequence
  Description of Artificial Sequence: Synthetic oligonucleotide
ttagttttggcgttcgtttcgttcgcggtagag

SEQ ID NO: 8390 - DNA, 22 bp, Artificial Sequence
  Description of Artificial Sequence: Synthetic oligonucleotide
ggatagtagagatcgttcgtgg

SEQ ID NO: 8391 - DNA, 22 bp, Artificial Sequence
  Description of Artificial Sequence: Synthetic oligonucleotide
cgttgagtagtcgtagggttag

SEQ ID NO: 8392 - DNA, 22 bp, Artificial Sequence
  Description of Artificial Sequence: Synthetic oligonucleotide
aaaacgtaaaatcgcgtacaat

SEQ ID NO: 8393 - DNA, 31 bp, Artificial Sequence
  Description of Artificial Sequence: Synthetic oligonucleotide
aagaggattgattgattacggcgtttagggg

SEQ ID NO: 8394 - DNA, 22 bp, Artificial Sequence
  Description of Artificial Sequence: Synthetic oligonucleotide
acgtaaaatcgcgtacaatacc

SEQ ID NO: 8395 - DNA, 20 bp, Artificial Sequence
  Description of Artificial Sequence: Synthetic oligonucleotide
aaaactccgactataccgcc

SEQ ID NO: 8396 - DNA, 30 bp, Artificial Sequence
  Description of Artificial Sequence: Synthetic oligonucleotide
ttcggggtgtagggagttgttcgtttagtt

SEQ ID NO: 8397 - DNA, 23 bp, Artificial Sequence
  Description of Artificial Sequence: Synthetic oligonucleotide
acgttgagtagtcgtagggttag

SEQ ID NO: 8398 - DNA, 21 bp, Artificial Sequence
  Description of Artificial Sequence: Synthetic oligonucleotide
gtacgggtcgattggttattt

SEQ ID NO: 8399 - DNA, 22 bp, Artificial Sequence
  Description of Artificial Sequence: Synthetic oligonucleotide
cctcaaacgtacactacgctac

SEQ ID NO: 8400 - DNA, 27 bp, Artificial Sequence
  Description of Artificial Sequence: Synthetic oligonucleotide
agttttcgcggagagcgtgggtttttt

SEQ ID NO: 8401 - DNA, 22 bp, Artificial Sequence
  Description of Artificial Sequence: Synthetic oligonucleotide
tacgttgagtagtcgtagggtt

SEQ ID NO: 8402 - DNA, 21 bp, Artificial Sequence
  Description of Artificial Sequence: Synthetic oligonucleotide
gggtacgtttttagttttgcg

SEQ ID NO: 8403 - DNA, 22 bp, Artificial Sequence
  Description of Artificial Sequence: Synthetic oligonucleotide
cgctacgacgcatctaactact

SEQ ID NO: 8404 - DNA, 32 bp, Artificial Sequence
  Description of Artificial Sequence: Synthetic oligonucleotide
ggcgaagtaagtgttttttcggcgtcggtcgt

SEQ ID NO: 8405 - DNA, 21 bp, Artificial Sequence
  Description of Artificial Sequence: Synthetic oligonucleotide
tacgggtcgattggttatttt

SEQ ID NO: 8406 - DNA, 21 bp, Artificial Sequence
  Description of Artificial Sequence: Synthetic oligonucleotide
gttaaggaatcggttagtcgg

SEQ ID NO: 8407 - DNA, 21 bp, Artificial Sequence
  Description of Artificial Sequence: Synthetic oligonucleotide
taaacgaaaaccccgtaacat

SEQ ID NO: 8408 - DNA, 32 bp, Artificial Sequence
  Description of Artificial Sequence: Synthetic oligonucleotide
ggcgcgagaaaagttttgggaaggcggttgta

SEQ ID NO: 8409 - DNA, 21 bp, Artificial Sequence
  Description of Artificial Sequence: Synthetic oligonucleotide
ggttaaggaatcggttagtcg

SEQ ID NO: 8410 - DNA, 21 bp, Artificial Sequence
  Description of Artificial Sequence: Synthetic oligonucleotide
caaacgtacactacgctacgc

SEQ ID NO: 8411 - DNA, 20 bp, Artificial Sequence
  Description of Artificial Sequence: Synthetic oligonucleotide
caaaactccgactataccgc

SEQ ID NO: 8412 - DNA, 20 bp, Artificial Sequence
  Description of Artificial Sequence: Synthetic oligonucleotide
ccaaaactccgactataccg

SEQ ID NO: 8413 - DNA, 22 bp, Artificial Sequence
  Description of Artificial Sequence: Synthetic oligonucleotide
aaaaacgtaaaatcgcgtacaa

SEQ ID NO: 8414 - DNA, 21 bp, Artificial Sequence
  Description of Artificial Sequence: Synthetic oligonucleotide
cggcggtgttgtttattttag

SEQ ID NO: 8415 - DNA, 22 bp, Artificial Sequence
  Description of Artificial Sequence: Synthetic oligonucleotide
tacgacgcatctaactactccc

SEQ ID NO: 8416 - DNA, 20 bp, Artificial Sequence
  Description of Artificial Sequence: Synthetic oligonucleotide
aacaataaccgaaaaacccg

SEQ ID NO: 8417 - DNA, 26 bp, Artificial Sequence
  Description of Artificial Sequence: Synthetic oligonucleotide
ttcgcggtagagggcggtatagtcgg

SEQ ID NO: 8418 - DNA, 22 bp, Artificial Sequence
  Description of Artificial Sequence: Synthetic oligonucleotide
gggatagtagagatcgttcgtg

SEQ ID NO: 8419 - DNA, 20 bp, Artificial Sequence
  Description of Artificial Sequence: Synthetic oligonucleotide
gtagagggcggtatagtcgg

SEQ ID NO: 8420 - DNA, 22 bp, Artificial Sequence
  Description of Artificial Sequence: Synthetic oligonucleotide
gtacgtccgaaaaacaataacc

SEQ ID NO: 8421 - DNA, 24 bp, Artificial Sequence
  Description of Artificial Sequence: Synthetic oligonucleotide
ggtagcgtcggtagtcgcgggttt

SEQ ID NO: 8422 - DNA, 20 bp, Artificial Sequence
  Description of Artificial Sequence: Synthetic oligonucleotide
ggtagagggcggtatagtcg

SEQ ID NO: 8423 - DNA, 20 bp, Artificial Sequence
  Description of Artificial Sequence: Synthetic oligonucleotide
aacgtacactacgctacgcc

SEQ ID NO: 8424 - DNA, 22 bp, Artificial Sequence
  Description of Artificial Sequence: Synthetic oligonucleotide
acgctacgacgcatctaactac

SEQ ID NO: 8425 - DNA, 21 bp, Artificial Sequence
  Description of Artificial Sequence: Synthetic oligonucleotide
ttcggttattgtttttcggac

SEQ ID NO: 8426 - DNA, 22 bp, Artificial Sequence
  Description of Artificial Sequence: Synthetic oligonucleotide
gaaactcctcttatcgacgacc

SEQ ID NO: 8427 - DNA, 30 bp, Artificial Sequence
  Description of Artificial Sequence: Synthetic oligonucleotide
tattgtcgtcgtcgtagaggggtgaggaaa

SEQ ID NO: 8428 - DNA, 22 bp, Artificial Sequence
  Description of Artificial Sequence: Synthetic oligonucleotide
cgttttgttcgaggttgtaaag

SEQ ID NO: 8429 - DNA, 20 bp, Artificial Sequence
  Description of Artificial Sequence: Synthetic oligonucleotide
tactcgctaacgcccaaata

SEQ ID NO: 8430 - DNA, 29 bp, Artificial Sequence
  Description of Artificial Sequence: Synthetic oligonucleotide
tttcgtttcgggaattgggtaagtagcgg

SEQ ID NO: 8431 - DNA, 23 bp, Artificial Sequence
  Description of Artificial Sequence: Synthetic oligonucleotide
gtcgtagggttagtattttcgat

SEQ ID NO: 8432 - DNA, 24 bp, Artificial Sequence
  Description of Artificial Sequence: Synthetic oligonucleotide
agtcgtagggttagtattttcgat

SEQ ID NO: 8433 - DNA, 22 bp, Artificial Sequence
  Description of Artificial Sequence: Synthetic oligonucleotide
ggtacgtttttagttttgcgtc

SEQ ID NO: 8434 - DNA, 20 bp, Artificial Sequence
  Description of Artificial Sequence: Synthetic oligonucleotide
acgcatctaactactcccgc

SEQ ID NO: 8435 - DNA, 22 bp, Artificial Sequence
  Description of Artificial Sequence: Synthetic oligonucleotide
gggtacgtttttagttttgcgt

SEQ ID NO: 8436 - DNA, 22 bp, Artificial Sequence
  Description of Artificial Sequence: Synthetic oligonucleotide
gctacgacgcatctaactactc

SEQ ID NO: 8437 - DNA, 22 bp, Artificial Sequence
  Description of Artificial Sequence: Synthetic oligonucleotide
gtcgataagaggagtttcggac

SEQ ID NO: 8438 - DNA, 20 bp, Artificial Sequence
  Description of Artificial Sequence: Synthetic oligonucleotide
aacgcaaactacgaaccaac

SEQ ID NO: 8439 - DNA, 34 bp, Artificial Sequence
  Description of Artificial Sequence: Synthetic oligonucleotide
gttttcgttttgttcgaggttgtaaagttgtgga

SEQ ID NO: 8440 - DNA, 22 bp, Artificial Sequence
  Description of Artificial Sequence: Synthetic oligonucleotide
ggtcgtcgataagaggagtttc

SEQ ID NO: 8441 - DNA, 33 bp, Artificial Sequence
  Description of Artificial Sequence: Synthetic oligonucleotide
gacgtcggttttcgttttgttcgaggttgtaaa

SEQ ID NO: 8442 - DNA, 21 bp, Artificial Sequence
  Description of Artificial Sequence: Synthetic oligonucleotide
aaacgcaaactacgaaccaac

SEQ ID NO: 8443 - DNA, 35 bp, Artificial Sequence
  Description of Artificial Sequence: Synthetic oligonucleotide
gttttgttcgaggttgtaaagttgtggattcggtt

SEQ ID NO: 8444 - DNA, 22 bp, Artificial Sequence
  Description of Artificial Sequence: Synthetic oligonucleotide
attttcgattatatttttgcgg

SEQ ID NO: 8445 - DNA, 20 bp, Artificial Sequence
  Description of Artificial Sequence: Synthetic oligonucleotide
aaaatcgcgtacaatacccc

SEQ ID NO: 8446 - DNA, 22 bp, Artificial Sequence
  Description of Artificial Sequence: Synthetic oligonucleotide
aaacgtaaaatcgcgtacaata

SEQ ID NO: 8447 - DNA, 21 bp, Artificial Sequence
  Description of Artificial Sequence: Synthetic oligonucleotide
aaacgtacactacgctacgcc

SEQ ID NO: 8448 - DNA, 19 bp, Artificial Sequence
  Description of Artificial Sequence: Synthetic oligonucleotide
cgcatctaactactcccgc

SEQ ID NO: 8449 - DNA, 23 bp, Artificial Sequence
  Description of Artificial Sequence: Synthetic oligonucleotide
ttacgttgagtagtcgtagggtt

SEQ ID NO: 8450 - DNA, 21 bp, Artificial Sequence
  Description of Artificial Sequence: Synthetic oligonucleotide
cgtaaaatcgcgtacaatacc

SEQ ID NO: 8451 - DNA, 21 bp, Artificial Sequence
  Description of Artificial Sequence: Synthetic oligonucleotide
aaactcctcttatcgacgacc

SEQ ID NO: 8452 - DNA, 19 bp, Artificial Sequence
  Description of Artificial Sequence: Synthetic oligonucleotide
tagagggcggtatagtcgg

SEQ ID NO: 8453 - DNA, 26 bp, Artificial Sequence
  Description of Artificial Sequence: Synthetic oligonucleotide
agcgtcggtagtcgcgggtttttcgg

SEQ ID NO: 8454 - DNA, 20 bp, Artificial Sequence
  Description of Artificial Sequence: Synthetic oligonucleotide
acgggtcgattggttatttt

SEQ ID NO: 8455 - DNA, 21 bp, Artificial Sequence
  Description of Artificial Sequence: Synthetic oligonucleotide
tcgataagaggagtttcggac

SEQ ID NO: 8456 - DNA, 20 bp, Artificial Sequence
  Description of Artificial Sequence: Synthetic oligonucleotide
aaacgaaaaccccgtaacat

SEQ ID NO: 8457 - DNA, 24 bp, Artificial Sequence
  Description of Artificial Sequence: Synthetic oligonucleotide
tcgtcgtgtttagtttttattacg

SEQ ID NO: 8458 - DNA, 21 bp, Artificial Sequence
  Description of Artificial Sequence: Synthetic oligonucleotide
cgactaaccgattccttaacc

SEQ ID NO: 8459 - DNA, 36 bp, Artificial Sequence
  Description of Artificial Sequence: Synthetic oligonucleotide
tacgttttatagtcggggtttttggttagtttcgga

SEQ ID NO: 8460 - DNA, 21 bp, Artificial Sequence
  Description of Artificial Sequence: Synthetic oligonucleotide
ccgactaaccgattccttaac

SEQ ID NO: 8461 - DNA, 20 bp, Artificial Sequence
  Description of Artificial Sequence: Synthetic oligonucleotide
taacccttactcgctaacgc

SEQ ID NO: 8462 - DNA, 22 bp, Artificial Sequence
  Description of Artificial Sequence: Synthetic oligonucleotide
atagtagagatcgttcgtgggg

SEQ ID NO: 8463 - DNA, 21 bp, Artificial Sequence
  Description of Artificial Sequence: Synthetic oligonucleotide
ttactcgctaacgcccaaata

SEQ ID NO: 8464 - DNA, 20 bp, Artificial Sequence
  Description of Artificial Sequence: Synthetic oligonucleotide
gtacgggaagtcgtttttcg

SEQ ID NO: 8465 - DNA, 22 bp, Artificial Sequence
  Description of Artificial Sequence: Synthetic oligonucleotide
ctcttatcgacgaccaaaactc

SEQ ID NO: 8466 - DNA, 21 bp, Artificial Sequence
  Description of Artificial Sequence: Synthetic oligonucleotide
ggtcgtcgataagaggagttt

SEQ ID NO: 8467 - DNA, 22 bp, Artificial Sequence
  Description of Artificial Sequence: Synthetic oligonucleotide
cctcttatcgacgaccaaaact

SEQ ID NO: 8468 - DNA, 20 bp, Artificial Sequence
  Description of Artificial Sequence: Synthetic oligonucleotide
tcggttattgtttttcggac

SEQ ID NO: 8469 - DNA, 20 bp, Artificial Sequence
  Description of Artificial Sequence: Synthetic oligonucleotide
agttagatgcgtcgtagcgt

SEQ ID NO: 8470 - DNA, 22 bp, Artificial Sequence
  Description of Artificial Sequence: Synthetic oligonucleotide
cgaacgatctctactatccctt

SEQ ID NO: 8471 - DNA, 24 bp, Artificial Sequence
  Description of Artificial Sequence: Synthetic oligonucleotide
gggaaggcggcgaaggataggggt

SEQ ID NO: 8472 - DNA, 19 bp, Artificial Sequence
  Description of Artificial Sequence: Synthetic oligonucleotide
tatatttttgcggggttcg

SEQ ID NO: 8473 - DNA, 22 bp, Artificial Sequence
  Description of Artificial Sequence: Synthetic oligonucleotide
taaaaacgtaaaatcgcgtaca

SEQ ID NO: 8474 - DNA, 19 bp, Artificial Sequence
  Description of Artificial Sequence: Synthetic oligonucleotide
acaataaccgaaaaacccg

SEQ ID NO: 8475 - DNA, 22 bp, Artificial Sequence
  Description of Artificial Sequence: Synthetic oligonucleotide
agttttggtcgtcgataagagg

SEQ ID NO: 8476 - DNA, 20 bp, Artificial Sequence
  Description of Artificial Sequence: Synthetic oligonucleotide
cggcggtgttgtttatttta

SEQ ID NO: 8477 - DNA, 22 bp, Artificial Sequence
  Description of Artificial Sequence: Synthetic oligonucleotide
aacgctacgacgcatctaacta

SEQ ID NO: 8478 - DNA, 21 bp, Artificial Sequence
  Description of Artificial Sequence: Synthetic oligonucleotide
gttttggtcgtcgataagagg

SEQ ID NO: 8479 - DNA, 19 bp, Artificial Sequence
  Description of Artificial Sequence: Synthetic oligonucleotide
tacgggaagtcgtttttcg

SEQ ID NO: 8480 - DNA, 21 bp, Artificial Sequence
  Description of Artificial Sequence: Synthetic oligonucleotide
caaactacgaaccaaccgaac

SEQ ID NO: 8481 - DNA, 23 bp, Artificial Sequence
  Description of Artificial Sequence: Synthetic oligonucleotide
gcgttcggtaggtagttttagtt

SEQ ID NO: 8482 - DNA, 20 bp, Artificial Sequence
  Description of Artificial Sequence: Synthetic oligonucleotide
ccgactataccgccctctac

SEQ ID NO: 8483 - DNA, 25 bp, Artificial Sequence
  Description of Artificial Sequence: Synthetic oligonucleotide
agagatcgttcgtggggtttcgggg

SEQ ID NO: 8484 - DNA, 21 bp, Artificial Sequence
  Description of Artificial Sequence: Synthetic oligonucleotide
gttcggttggttcgtagtttg

SEQ ID NO: 8485 - DNA, 21 bp, Artificial Sequence
  Description of Artificial Sequence: Synthetic oligonucleotide
ctaacccttactcgctaacgc

SEQ ID NO: 8486 - DNA, 19 bp, Artificial Sequence
  Description of Artificial Sequence: Synthetic oligonucleotide
actccgactataccgccct

SEQ ID NO: 8487 - DNA, 21 bp, Artificial Sequence
  Description of Artificial Sequence: Synthetic oligonucleotide
tcgttttgttcgaggttgtaa

SEQ ID NO: 8488 - DNA, 21 bp, Artificial Sequence
  Description of Artificial Sequence: Synthetic oligonucleotide
ttcgttttgttcgaggttgta

SEQ ID NO: 8489 - DNA, 22 bp, Artificial Sequence
  Description of Artificial Sequence: Synthetic oligonucleotide
ctacgacgcatctaactactcc

SEQ ID NO: 8490 - DNA, 21 bp, Artificial Sequence
  Description of Artificial Sequence: Synthetic oligonucleotide
ttggtcgtcgataagaggagt

SEQ ID NO: 8491 - DNA, 22 bp, Artificial Sequence
  Description of Artificial Sequence: Synthetic oligonucleotide
tccgactaaccgattccttaac

SEQ ID NO: 8492 - DNA, 21 bp, Artificial Sequence
  Description of Artificial Sequence: Synthetic oligonucleotide
acgacgcatctaactactccc

SEQ ID NO: 8493 - DNA, 21 bp, Artificial Sequence
  Description of Artificial Sequence: Synthetic oligonucleotide
gacgtaattgtttagggcgtt

SEQ ID NO: 8494 - DNA, 20 bp, Artificial Sequence
  Description of Artificial Sequence: Synthetic oligonucleotide
ctacccaacatacgcgaaaa

SEQ ID NO: 8495 - DNA, 24 bp, Artificial Sequence
  Description of Artificial Sequence: Synthetic oligonucleotide
tggagtagggcgggcgagaagagt

SEQ ID NO: 8496 - DNA, 20 bp, Artificial Sequence
  Description of Artificial Sequence: Synthetic oligonucleotide
ttcggttggttcgtagtttg

SEQ ID NO: 8497 - DNA, 20 bp, Artificial Sequence
  Description of Artificial Sequence: Synthetic oligonucleotide
ttatatttttgcggggttcg

SEQ ID NO: 8498 - DNA, 22 bp, Artificial Sequence
  Description of Artificial Sequence: Synthetic oligonucleotide
ggcgttcggtaggtagttttag

SEQ ID NO: 8499 - DNA, 19 bp, Artificial Sequence
  Description of Artificial Sequence: Synthetic oligonucleotide
cgaaacgcaaactacgaac

SEQ ID NO: 8500 - DNA, 19 bp, Artificial Sequence
  Description of Artificial Sequence: Synthetic oligonucleotide
aacgaaacgcaaactacga

SEQ ID NO: 8501 - DNA, 21 bp, Artificial Sequence
  Description of Artificial Sequence: Synthetic oligonucleotide
ggcgttcggtaggtagtttta

SEQ ID NO: 8502 - DNA, 20 bp, Artificial Sequence
  Description of Artificial Sequence: Synthetic oligonucleotide
cgactataccgccctctacc

SEQ ID NO: 8503 - DNA, 20 bp, Artificial Sequence
  Description of Artificial Sequence: Synthetic oligonucleotide
aacgaaaaccccgtaacatc

SEQ ID NO: 8504 - DNA, 20 bp, Artificial Sequence
  Description of Artificial Sequence: Synthetic oligonucleotide
gaaacgcaaactacgaacca

SEQ ID NO: 8505 - DNA, 19 bp, Artificial Sequence
  Description of Artificial Sequence: Synthetic oligonucleotide
gtcgtcgtagaggggtgag

SEQ ID NO: 8506 - DNA, 22 bp, Artificial Sequence
  Description of Artificial Sequence: Synthetic oligonucleotide
ctttacaacctcgaacaaaacg

SEQ ID NO: 8507 - DNA, 34 bp, Artificial Sequence
  Description of Artificial Sequence: Synthetic oligonucleotide
tttatcgagttttggtcgtcgataagaggagttt

SEQ ID NO: 8508 - DNA, 20 bp, Artificial Sequence
  Description of Artificial Sequence: Synthetic oligonucleotide
cgggtttttcggttattgtt

SEQ ID NO: 8509 - DNA, 29 bp, Artificial Sequence
  Description of Artificial Sequence: Synthetic oligonucleotide
gtacgggaagtcgtttttcgcgtcgtcgt

SEQ ID NO: 8510 - DNA, 22 bp, Artificial Sequence
  Description of Artificial Sequence: Synthetic oligonucleotide
aattaaaaacgtaaaatcgcgt

SEQ ID NO: 8511 - DNA, 22 bp, Artificial Sequence
  Description of Artificial Sequence: Synthetic oligonucleotide
tttcgttttgttcgaggttgta

SEQ ID NO: 8512 - DNA, 20 bp, Artificial Sequence
  Description of Artificial Sequence: Synthetic oligonucleotide
aactccgactataccgccct

SEQ ID NO: 8513 - DNA, 21 bp, Artificial Sequence
  Description of Artificial Sequence: Synthetic oligonucleotide
tggtcgtcgataagaggagtt

SEQ ID NO: 8514 - DNA, 20 bp, Artificial Sequence
  Description of Artificial Sequence: Synthetic oligonucleotide
aaacgcaaactacgaaccaa

SEQ ID NO: 8515 - DNA, 24 bp, Artificial Sequence
  Description of Artificial Sequence: Synthetic oligonucleotide
attacgttgagtagtcgtagggtt

SEQ ID NO: 8516 - DNA, 19 bp, Artificial Sequence
  Description of Artificial Sequence: Synthetic oligonucleotide
aaatcgcgtacaatacccc

SEQ ID NO: 8517 - DNA, 21 bp, Artificial Sequence
  Description of Artificial Sequence: Synthetic oligonucleotide
gtttagttttggcgttcgttt

SEQ ID NO: 8518 - DNA, 20 bp, Artificial Sequence
  Description of Artificial Sequence: Synthetic oligonucleotide
ttttggtcgtcgataagagg

SEQ ID NO: 8519 - DNA, 21 bp, Artificial Sequence
  Description of Artificial Sequence: Synthetic oligonucleotide
taaagttgtggattcggttcg

SEQ ID NO: 8520 - DNA, 19 bp, Artificial Sequence
  Description of Artificial Sequence: Synthetic oligonucleotide
actcgctaacgcccaaata

SEQ ID NO: 8521 - DNA, 25 bp, Artificial Sequence
  Description of Artificial Sequence: Synthetic oligonucleotide
cgtcgtgtttagtttttattacgtt

SEQ ID NO: 8522 - DNA, 23 bp, Artificial Sequence
  Description of Artificial Sequence: Synthetic oligonucleotide
cgtcgtgtttagtttttattacg

SEQ ID NO: 8523 - DNA, 22 bp, Artificial Sequence
  Description of Artificial Sequence: Synthetic oligonucleotide
acgttttatagtcggggttttt

SEQ ID NO: 8524 - DNA, 18 bp, Artificial Sequence
  Description of Artificial Sequence: Synthetic oligonucleotide
aaacttttctcgcgcctc

SEQ ID NO: 8525 - DNA, 32 bp, Artificial Sequence
  Description of Artificial Sequence: Synthetic oligonucleotide
tttcgtgcgttcgagagaatttttttaggggt

SEQ ID NO: 8526 - DNA, 22 bp, Artificial Sequence
  Description of Artificial Sequence: Synthetic oligonucleotide
tacgtttttagttttgcgtcgt

SEQ ID NO: 8527 - DNA, 23 bp, Artificial Sequence
  Description of Artificial Sequence: Synthetic oligonucleotide
acgctacgacgcatctaactact

SEQ ID NO: 8528 - DNA, 20 bp, Artificial Sequence
  Description of Artificial Sequence: Synthetic oligonucleotide
ttagttttggcgttcgtttc

SEQ ID NO: 8529 - DNA, 21 bp, Artificial Sequence
  Description of Artificial Sequence: Synthetic oligonucleotide
tacgtccgaaaaacaataacc

SEQ ID NO: 8530 - DNA, 25 bp, Artificial Sequence
  Description of Artificial Sequence: Synthetic oligonucleotide
tagtcgtagggttagtattttcgat

SEQ ID NO: 8531 - DNA, 21 bp, Artificial Sequence
  Description of Artificial Sequence: Synthetic oligonucleotide
tagtagagatcgttcgtgggg

SEQ ID NO: 8532 - DNA, 20 bp, Artificial Sequence
  Description of Artificial Sequence: Synthetic oligonucleotide
tttggtcgtcgataagagga

SEQ ID NO: 8533 - DNA, 21 bp, Artificial Sequence
  Description of Artificial Sequence: Synthetic oligonucleotide
tttacaacctcgaacaaaacg

SEQ ID NO: 8534 - DNA, 20 bp, Artificial Sequence
  Description of Artificial Sequence: Synthetic oligonucleotide
agggcggtatagtcggagtt

SEQ ID NO: 8535 - DNA, 19 bp, Artificial Sequence
  Description of Artificial Sequence: Synthetic oligonucleotide
atctaactactcccgcgcc

SEQ ID NO: 8536 - DNA, 22 bp, Artificial Sequence
  Description of Artificial Sequence: Synthetic oligonucleotide
atacacgcctaaaaataatcgc

SEQ ID NO: 8537 - DNA, 22 bp, Artificial Sequence
  Description of Artificial Sequence: Synthetic oligonucleotide
gtatttgtttcgtcggagtttt

SEQ ID NO: 8538 - DNA, 25 bp, Artificial Sequence
  Description of Artificial Sequence: Synthetic oligonucleotide
ttcggcggcgtaggattgggggcgt

SEQ ID NO: 8539 - DNA, 22 bp, Artificial Sequence
  Description of Artificial Sequence: Synthetic oligonucleotide
ggtgggtagtatcgtcgtagtt

SEQ ID NO: 8540 - DNA, 23 bp, Artificial Sequence
  Description of Artificial Sequence: Synthetic oligonucleotide
ggcggcgtaggattgggggcgtg

SEQ ID NO: 8541 - DNA, 23 bp, Artificial Sequence
  Description of Artificial Sequence: Synthetic oligonucleotide
tctcgaacaccgaataaaataaa

SEQ ID NO: 8542 - DNA, 22 bp, Artificial Sequence
  Description of Artificial Sequence: Synthetic oligonucleotide
atagttcgggtagttagcgttg

SEQ ID NO: 8543 - DNA, 36 bp, Artificial Sequence
  Description of Artificial Sequence: Synthetic oligonucleotide
ggttaggattcgttgatataggtattttggttgcgt

SEQ ID NO: 8544 - DNA, 21 bp, Artificial Sequence
  Description of Artificial Sequence: Synthetic oligonucleotide
atacactcacactcgctctcg

SEQ ID NO: 8545 - DNA, 22 bp, Artificial Sequence
  Description of Artificial Sequence: Synthetic oligonucleotide
aggtatttgtttcgtcggagtt

SEQ ID NO: 8546 - DNA, 21 bp, Artificial Sequence
  Description of Artificial Sequence: Synthetic oligonucleotide
ggtatttgtttcgtcggagtt

SEQ ID NO: 8547 - DNA, 22 bp, Artificial Sequence
  Description of Artificial Sequence: Synthetic oligonucleotide
catcctcgattacattcctacg

SEQ ID NO: 8548 - DNA, 21 bp, Artificial Sequence
  Description of Artificial Sequence: Synthetic oligonucleotide
ggagtcgcgtgtagtgtttta

SEQ ID NO: 8549 - DNA, 25 bp, Artificial Sequence
  Description of Artificial Sequence: Synthetic oligonucleotide
ggcgagggcgttttttggacgtcgt

SEQ ID NO: 8550 - DNA, 21 bp, Artificial Sequence
  Description of Artificial Sequence: Synthetic oligonucleotide
aaggtatttgtttcgtcggag

SEQ ID NO: 8551 - DNA, 21 bp, Artificial Sequence
  Description of Artificial Sequence: Synthetic oligonucleotide
ctcgcgcatactaaacaaaaa

SEQ ID NO: 8552 - DNA, 22 bp, Artificial Sequence
  Description of Artificial Sequence: Synthetic oligonucleotide
cgtaggaatgtaatcgaggatg

SEQ ID NO: 8553 - DNA, 33 bp, Artificial Sequence
  Description of Artificial Sequence: Synthetic oligonucleotide
tgcggttgtttaacgtggtggttttcgtttatt

SEQ ID NO: 8554 - DNA, 23 bp, Artificial Sequence
  Description of Artificial Sequence: Synthetic oligonucleotide
ctctcgaacaccgaataaaataa

SEQ ID NO: 8555 - DNA, 22 bp, Artificial Sequence
  Description of Artificial Sequence: Synthetic oligonucleotide
tatttgtttcgtcggagtttta

SEQ ID NO: 8556 - DNA, 23 bp, Artificial Sequence
  Description of Artificial Sequence: Synthetic oligonucleotide
caatacacgcctaaaaataatcg

SEQ ID NO: 8557 - DNA, 21 bp, Artificial Sequence
  Description of Artificial Sequence: Synthetic oligonucleotide
gggtgggtagtatcgtcgtag

SEQ ID NO: 8558 - DNA, 22 bp, Artificial Sequence
  Description of Artificial Sequence: Synthetic oligonucleotide
acgcaatacacgcctaaaaata

SEQ ID NO: 8559 - DNA, 25 bp, Artificial Sequence
  Description of Artificial Sequence: Synthetic oligonucleotide
tgggggcgtgtttagttttcggcga

SEQ ID NO: 8560 - DNA, 22 bp, Artificial Sequence
  Description of Artificial Sequence: Synthetic oligonucleotide
cgcaatacacgcctaaaaataa

SEQ ID NO: 8561 - DNA, 35 bp, Artificial Sequence
  Description of Artificial Sequence: Synthetic oligonucleotide
ggcggcgtaggattgggggcgtgtttagttttcgg

SEQ ID NO: 8562 - DNA, 22 bp, Artificial Sequence
  Description of Artificial Sequence: Synthetic oligonucleotide
gctctcgaacaccgaataaaat

SEQ ID NO: 8563 - DNA, 22 bp, Artificial Sequence
  Description of Artificial Sequence: Synthetic oligonucleotide
cctacgaaacccgaaataaaaa

SEQ ID NO: 8564 - DNA, 22 bp, Artificial Sequence
  Description of Artificial Sequence: Synthetic oligonucleotide
gagtcgcgtgtagtgttttaga

SEQ ID NO: 8565 - DNA, 22 bp, Artificial Sequence
  Description of Artificial Sequence: Synthetic oligonucleotide
aaggtatttgtttcgtcggagt

SEQ ID NO: 8566 - DNA, 22 bp, Artificial Sequence
  Description of Artificial Sequence: Synthetic oligonucleotide
ctcgaacaccgaataaaataaa

SEQ ID NO: 8567 - DNA, 21 bp, Artificial Sequence
  Description of Artificial Sequence: Synthetic oligonucleotide
cgcaatacacgcctaaaaata

SEQ ID NO: 8568 - DNA, 21 bp, Artificial Sequence
  Description of Artificial Sequence: Synthetic oligonucleotide
tcctacgaaacccgaaataaa

SEQ ID NO: 8569 - DNA, 23 bp, Artificial Sequence
  Description of Artificial Sequence: Synthetic oligonucleotide
aaatagttcgggtagttagcgtt

SEQ ID NO: 8570 - DNA, 21 bp, Artificial Sequence
  Description of Artificial Sequence: Synthetic oligonucleotide
tcgatacactcacactcgctc

SEQ ID NO: 8571 - DNA, 22 bp, Artificial Sequence
  Description of Artificial Sequence: Synthetic oligonucleotide
caccgaaaaataaaattccgta

SEQ ID NO: 8572 - DNA, 20 bp, Artificial Sequence
  Description of Artificial Sequence: Synthetic oligonucleotide
cggaggtttcgtggtattta

SEQ ID NO: 8573 - DNA, 33 bp, Artificial Sequence
  Description of Artificial Sequence: Synthetic oligonucleotide
tttagaatttttttcgcgttttcggttggtcga

SEQ ID NO: 8574 - DNA, 21 bp, Artificial Sequence
  Description of Artificial Sequence: Synthetic oligonucleotide
tacacgcctaaaaataatcgc

SEQ ID NO: 8575 - DNA, 23 bp, Artificial Sequence
  Description of Artificial Sequence: Synthetic oligonucleotide
aatacacgcctaaaaataatcgc

SEQ ID NO: 8576 - DNA, 21 bp, Artificial Sequence
  Description of Artificial Sequence: Synthetic oligonucleotide
acgcaatacacgcctaaaaat

SEQ ID NO: 8577 - DNA, 21 bp, Artificial Sequence
  Description of Artificial Sequence: Synthetic oligonucleotide
cacgaatcgactaatcacctt

SEQ ID NO: 8578 - DNA, 22 bp, Artificial Sequence
  Description of Artificial Sequence: Synthetic oligonucleotide
gcgattatttttaggcgtgtat

SEQ ID NO: 8579 - DNA, 25 bp, Artificial Sequence
  Description of Artificial Sequence: Synthetic oligonucleotide
tacgtttttcgcggaggttgcgggt

SEQ ID NO: 8580 - DNA, 20 bp, Artificial Sequence
  Description of Artificial Sequence: Synthetic oligonucleotide
gcacgaatcgactaatcacc

SEQ ID NO: 8581 - DNA, 20 bp, Artificial Sequence
  Description of Artificial Sequence: Synthetic oligonucleotide
acgtaaacctctccctaccg

SEQ ID NO: 8582 - DNA, 22 bp, Artificial Sequence
  Description of Artificial Sequence: Synthetic oligonucleotide
tagtatcgtcgtagttttcggc

SEQ ID NO: 8583 - DNA, 23 bp, Artificial Sequence
  Description of Artificial Sequence: Synthetic oligonucleotide
tgggtagtatcgtcgtagttttc

SEQ ID NO: 8584 - DNA, 26 bp, Artificial Sequence
  Description of Artificial Sequence: Synthetic oligonucleotide
ggcgtaggattgggggcgtgtttagt

SEQ ID NO: 8585 - DNA, 22 bp, Artificial Sequence
  Description of Artificial Sequence: Synthetic oligonucleotide
aacgcaatacacgcctaaaaat

SEQ ID NO: 8586 - DNA, 24 bp, Artificial Sequence
  Description of Artificial Sequence: Synthetic oligonucleotide
gtgggtagtatcgtcgtagttttc

SEQ ID NO: 8587 - DNA, 22 bp, Artificial Sequence
  Description of Artificial Sequence: Synthetic oligonucleotide
aatagttcgggtagttagcgtt

SEQ ID NO: 8588 - DNA, 22 bp, Artificial Sequence
  Description of Artificial Sequence: Synthetic oligonucleotide
ctaaaacactacacgcgactcc

SEQ ID NO: 8589 - DNA, 21 bp, Artificial Sequence
  Description of Artificial Sequence: Synthetic oligonucleotide
gtttagattcgaggtcgttgc

SEQ ID NO: 8590 - DNA, 25 bp, Artificial Sequence
  Description of Artificial Sequence: Synthetic oligonucleotide
ggggaaattcgcgggatagggggtt

SEQ ID NO: 8591 - DNA, 22 bp, Artificial Sequence
  Description of Artificial Sequence: Synthetic oligonucleotide
aactacgacgatactacccacc

SEQ ID NO: 8592 - DNA, 21 bp, Artificial Sequence
  Description of Artificial Sequence: Synthetic oligonucleotide
gtatttggttgttttcgcgtt

SEQ ID NO: 8593 - DNA, 41 bp, Artificial Sequence
  Description of Artificial Sequence: Synthetic oligonucleotide
ggcgtcgggaaggtatttgtttcgtcggagttttaggtcga

SEQ ID NO: 8594 - DNA, 21 bp, Artificial Sequence
  Description of Artificial Sequence: Synthetic oligonucleotide
taaaacactacacgcgactcc

SEQ ID NO: 8595 - DNA, 21 bp, Artificial Sequence
  Description of Artificial Sequence: Synthetic oligonucleotide
tcgtaggaatgtaatcgagga

SEQ ID NO: 8596 - DNA, 21 bp, Artificial Sequence
  Description of Artificial Sequence: Synthetic oligonucleotide
tagttcgggtagttagcgttg

SEQ ID NO: 8597 - DNA, 22 bp, Artificial Sequence
  Description of Artificial Sequence: Synthetic oligonucleotide
tatttttaggcgtgtattgcgt

SEQ ID NO: 8598 - DNA, 20 bp, Artificial Sequence
  Description of Artificial Sequence: Synthetic oligonucleotide
tttagattcgaggtcgttgc

SEQ ID NO: 8599 - DNA, 21 bp, Artificial Sequence
  Description of Artificial Sequence: Synthetic oligonucleotide
atttgtttcgtcggagtttta

SEQ ID NO: 8600 - DNA, 20 bp, Artificial Sequence
  Description of Artificial Sequence: Synthetic oligonucleotide
tatttggttgttttcgcgtt

SEQ ID NO: 8601 - DNA, 21 bp, Artificial Sequence
  Description of Artificial Sequence: Synthetic oligonucleotide
aacgtaaacctctccctaccg

SEQ ID NO: 8602 - DNA, 20 bp, Artificial Sequence
  Description of Artificial Sequence: Synthetic oligonucleotide
cgcaatacacgcctaaaaat

SEQ ID NO: 8603 - DNA, 20 bp, Artificial Sequence
  Description of Artificial Sequence: Synthetic oligonucleotide
aaaaacgctcgacaaacaac

SEQ ID NO: 8604 - DNA, 21 bp, Artificial Sequence
  Description of Artificial Sequence: Synthetic oligonucleotide
cgttagggttgaacggatagt

SEQ ID NO: 8605 - DNA, 33 bp, Artificial Sequence
  Description of Artificial Sequence: Synthetic oligonucleotide
tatatttcggggttttacgggcggtttttgttg

SEQ ID NO: 8606 - DNA, 23 bp, Artificial Sequence
  Description of Artificial Sequence: Synthetic oligonucleotide
cgattatttttaggcgtgtattg

SEQ ID NO: 8607 - DNA, 22 bp, Artificial Sequence
  Description of Artificial Sequence: Synthetic oligonucleotide
gtcgcgtgtagtgttttagacg

SEQ ID NO: 8608 - DNA, 22 bp, Artificial Sequence
  Description of Artificial Sequence: Synthetic oligonucleotide
actacgacgatactacccaccc

SEQ ID NO: 8609 - DNA, 21 bp, Artificial Sequence
  Description of Artificial Sequence: Synthetic oligonucleotide
cgaacttctcgaccactacct

SEQ ID NO: 8610 - DNA, 21 bp, Artificial Sequence
  Description of Artificial Sequence: Synthetic oligonucleotide
tttttgtcggcgattagagtt

SEQ ID NO: 8611 - DNA, 24 bp, Artificial Sequence
  Description of Artificial Sequence: Synthetic oligonucleotide
ttttttgcgacggcggtagtgcgg

SEQ ID NO: 8612 - DNA, 22 bp, Artificial Sequence
  Description of Artificial Sequence: Synthetic oligonucleotide
ttatttttaggcgtgtattgcg

SEQ ID NO: 8613 - DNA, 20 bp, Artificial Sequence
  Description of Artificial Sequence: Synthetic oligonucleotide
tcgcgcatactaaacaaaaa

SEQ ID NO: 8614 - DNA, 23 bp, Artificial Sequence
  Description of Artificial Sequence: Synthetic oligonucleotide
acatcctcgattacattcctacg

SEQ ID NO: 8615 - DNA, 20 bp, Artificial Sequence
  Description of Artificial Sequence: Synthetic oligonucleotide
cgggaaggtatttgtttcgt

SEQ ID NO: 8616 - DNA, 21 bp, Artificial Sequence
  Description of Artificial Sequence: Synthetic oligonucleotide
tcgcgtgtagtgttttagacg

SEQ ID NO: 8617 - DNA, 20 bp, Artificial Sequence
  Description of Artificial Sequence: Synthetic oligonucleotide
cgatacactcacactcgctc

SEQ ID NO: 8618 - DNA, 21 bp, Artificial Sequence
  Description of Artificial Sequence: Synthetic oligonucleotide
ctacgacgatactacccaccc

SEQ ID NO: 8619 - DNA, 21 bp, Artificial Sequence
  Description of Artificial Sequence: Synthetic oligonucleotide
ctacgaaacccgaaataaaaa

SEQ ID NO: 8620 - DNA, 22 bp, Artificial Sequence
  Description of Artificial Sequence: Synthetic oligonucleotide
cacgaatcgactaatcacctta

SEQ ID NO: 8621 - DNA, 21 bp, Artificial Sequence
  Description of Artificial Sequence: Synthetic oligonucleotide
cggtagggagaggtttacgtt

SEQ ID NO: 8622 - DNA, 27 bp, Artificial Sequence
  Description of Artificial Sequence: Synthetic oligonucleotide
gttttcggggggcgttgggatttgtaa

SEQ ID NO: 8623 - DNA, 20 bp, Artificial Sequence
  Description of Artificial Sequence: Synthetic oligonucleotide
cctcgcgcatactaaacaaa

SEQ ID NO: 8624 - DNA, 22 bp, Artificial Sequence
  Description of Artificial Sequence: Synthetic oligonucleotide
caacgctaactacccgaactat

SEQ ID NO: 8625 - DNA, 19 bp, Artificial Sequence
  Description of Artificial Sequence: Synthetic oligonucleotide
aaggatttcggcgttatga

SEQ ID NO: 8626 - DNA, 32 bp, Artificial Sequence
  Description of Artificial Sequence: Synthetic oligonucleotide
ggcgcgaaggggggattttaatttcgttttaa

SEQ ID NO: 8627 - DNA, 21 bp, Artificial Sequence
  Description of Artificial Sequence: Synthetic oligonucleotide
agtatcgtcgtagttttcggc

SEQ ID NO: 8628 - DNA, 20 bp, Artificial Sequence
  Description of Artificial Sequence: Synthetic oligonucleotide
acacgcctaaaaataatcgc

SEQ ID NO: 8629 - DNA, 22 bp, Artificial Sequence
  Description of Artificial Sequence: Synthetic oligonucleotide
aatacacgcctaaaaataatcg

SEQ ID NO: 8630 - DNA, 20 bp, Artificial Sequence
  Description of Artificial Sequence: Synthetic oligonucleotide
tcctacgaaacccgaaataa

SEQ ID NO: 8631 - DNA, 22 bp, Artificial Sequence
  Description of Artificial Sequence: Synthetic oligonucleotide
ggagtcgcgtgtagtgttttag

SEQ ID NO: 8632 - DNA, 19 bp, Artificial Sequence
  Description of Artificial Sequence: Synthetic oligonucleotide
aaaggatttcggcgttatg

SEQ ID NO: 8633 - DNA, 23 bp, Artificial Sequence
  Description of Artificial Sequence: Synthetic oligonucleotide
aaactacgacgatactacccacc

SEQ ID NO: 8634 - DNA, 21 bp, Artificial Sequence
  Description of Artificial Sequence: Synthetic oligonucleotide
cgaaaaacgtaaacctctccc

SEQ ID NO: 8635 - DNA, 20 bp, Artificial Sequence
  Description of Artificial Sequence: Synthetic oligonucleotide
ctctccctaccgctaaaacg

SEQ ID NO: 8636 - DNA, 19 bp, Artificial Sequence
  Description of Artificial Sequence: Synthetic oligonucleotide
tctccctaccgctaaaacg

SEQ ID NO: 8637 - DNA, 21 bp, Artificial Sequence
  Description of Artificial Sequence: Synthetic oligonucleotide
atttttaggcgtgtattgcgt

SEQ ID NO: 8638 - DNA, 19 bp, Artificial Sequence
  Description of Artificial Sequence: Synthetic oligonucleotide
cgcacgaatcgactaatca

SEQ ID NO: 8639 - DNA, 23 bp, Artificial Sequence
  Description of Artificial Sequence: Synthetic oligonucleotide
aatagttcgggtagttagcgttg

SEQ ID NO: 8640 - DNA, 20 bp, Artificial Sequence
  Description of Artificial Sequence: Synthetic oligonucleotide
gaaggtatttgtttcgtcgg

SEQ ID NO: 8641 - DNA, 19 bp, Artificial Sequence
  Description of Artificial Sequence: Synthetic oligonucleotide
atttggttgttttcgcgtt

SEQ ID NO: 8642 - DNA, 20 bp, Artificial Sequence
  Description of Artificial Sequence: Synthetic oligonucleotide
ttttgtcggcgattagagtt

SEQ ID NO: 8643 - DNA, 20 bp, Artificial Sequence
  Description of Artificial Sequence: Synthetic oligonucleotide
aaaacactacacgcgactcc

SEQ ID NO: 8644 - DNA, 20 bp, Artificial Sequence
  Description of Artificial Sequence: Synthetic oligonucleotide
tggagtcgcgtgtagtgttt

SEQ ID NO: 8645 - DNA, 19 bp, Artificial Sequence
  Description of Artificial Sequence: Synthetic oligonucleotide
cacgttaaacaaccgcaaa

SEQ ID NO: 8646 - DNA, 20 bp, Artificial Sequence
  Description of Artificial Sequence: Synthetic oligonucleotide
gaaaggatttcggcgttatg

SEQ ID NO: 8647 - DNA, 19 bp, Artificial Sequence
  Description of Artificial Sequence: Synthetic oligonucleotide
cgtcgggaaggtatttgtt

SEQ ID NO: 8648 - DNA, 21 bp, Artificial Sequence
  Description of Artificial Sequence: Synthetic oligonucleotide
cctacgaaacccgaaataaaa

SEQ ID NO: 8649 - DNA, 20 bp, Artificial Sequence
  Description of Artificial Sequence: Synthetic oligonucleotide
gtggagtcgcgtgtagtgtt

SEQ ID NO: 8650 - DNA, 21 bp, Artificial Sequence
  Description of Artificial Sequence: Synthetic oligonucleotide
gggagaggtttacgtttttcg

SEQ ID NO: 8651 - DNA, 20 bp, Artificial Sequence
  Description of Artificial Sequence: Synthetic oligonucleotide
agttcgggtagttagcgttg

SEQ ID NO: 8652 - DNA, 20 bp, Artificial Sequence
  Description of Artificial Sequence: Synthetic oligonucleotide
cgtcgggaaggtatttgttt

SEQ ID NO: 8653 - DNA, 23 bp, Artificial Sequence
  Description of Artificial Sequence: Synthetic oligonucleotide
ggtgggtagtatcgtcgtagttt

SEQ ID NO: 8654 - DNA, 21 bp, Artificial Sequence
  Description of Artificial Sequence: Synthetic oligonucleotide
aactctaatcgccgacaaaaa

SEQ ID NO: 8655 - DNA, 20 bp, Artificial Sequence
  Description of Artificial Sequence: Synthetic oligonucleotide
gaagcgtaggttgcgagtta

SEQ ID NO: 8656 - DNA, 36 bp, Artificial Sequence
  Description of Artificial Sequence: Synthetic oligonucleotide
gtcgagtttataattttgtagtttcgggtagggcga

SEQ ID NO: 8657 - DNA, 20 bp, Artificial Sequence
  Description of Artificial Sequence: Synthetic oligonucleotide
gcgaaaaacgtaaacctctc

SEQ ID NO: 8658 - DNA, 21 bp, Artificial Sequence
  Description of Artificial Sequence: Synthetic oligonucleotide
atcctcgattacattcctacg

SEQ ID NO: 8659 - DNA, 19 bp, Artificial Sequence
  Description of Artificial Sequence: Synthetic oligonucleotide
cgtaaacctctccctaccg

SEQ ID NO: 8660 - DNA, 20 bp, Artificial Sequence
  Description of Artificial Sequence: Synthetic oligonucleotide
cgcgaaaaacgtaaacctct

SEQ ID NO: 8661 - DNA, 20 bp, Artificial Sequence
  Description of Artificial Sequence: Synthetic oligonucleotide
cacgcctaaaaataatcgcc

SEQ ID NO: 8662 - DNA, 18 bp, Artificial Sequence
  Description of Artificial Sequence: Synthetic oligonucleotide
cgccctacccgaaactac

SEQ ID NO: 8663 - DNA, 22 bp, Artificial Sequence
  Description of Artificial Sequence: Synthetic oligonucleotide
ttttattcgttggcgtttaagt

SEQ ID NO: 8664 - DNA, 42 bp, Artificial Sequence
  Description of Artificial Sequence: Synthetic oligonucleotide
ttcgttatttgtttagttttcgaagcgaagcgtaggttgcga

SEQ ID NO: 8665 - DNA, 20 bp, Artificial Sequence
  Description of Artificial Sequence: Synthetic oligonucleotide
cgcgtgtagtgttttagacg

SEQ ID NO: 8666 - DNA, 21 bp, Artificial Sequence
  Description of Artificial Sequence: Synthetic oligonucleotide
tcgaacaccgaataaaataaa

SEQ ID NO: 8667 - DNA, 23 bp, Artificial Sequence
  Description of Artificial Sequence: Synthetic oligonucleotide
gggtagtatcgtcgtagttttcg

SEQ ID NO: 8668 - DNA, 19 bp, Artificial Sequence
  Description of Artificial Sequence: Synthetic oligonucleotide
tggagtcgcgtgtagtgtt

SEQ ID NO: 8669 - DNA, 20 bp, Artificial Sequence
  Description of Artificial Sequence: Synthetic oligonucleotide
gagaggtttacgtttttcgc

SEQ ID NO: 8670 - DNA, 20 bp, Artificial Sequence
  Description of Artificial Sequence: Synthetic oligonucleotide
tcgatacactcacactcgct

SEQ ID NO: 8671 - DNA, 22 bp, Artificial Sequence
  Description of Artificial Sequence: Synthetic oligonucleotide
ggtagtatcgtcgtagttttcg

SEQ ID NO: 8672 - DNA, 23 bp, Artificial Sequence
  Description of Artificial Sequence: Synthetic oligonucleotide
cgaatcgactaatcaccttaaaa

SEQ ID NO: 8673 - DNA, 20 bp, Artificial Sequence
  Description of Artificial Sequence: Synthetic oligonucleotide
cgttttagcggtagggagag

SEQ ID NO: 8674 - DNA, 19 bp, Artificial Sequence
  Description of Artificial Sequence: Synthetic oligonucleotide
caacgcaatacacgcctaa

SEQ ID NO: 8675 - DNA, 23 bp, Artificial Sequence
  Description of Artificial Sequence: Synthetic oligonucleotide
gtagtatcgtcgtagttttcggc

SEQ ID NO: 8676 - DNA, 18 bp, Artificial Sequence
  Description of Artificial Sequence: Synthetic oligonucleotide
cactcgctctcgaacacc

SEQ ID NO: 8677 - DNA, 19 bp, Artificial Sequence
  Description of Artificial Sequence: Synthetic oligonucleotide
gtttacgtttttcgcggag

SEQ ID NO: 8678 - DNA, 20 bp, Artificial Sequence
  Description of Artificial Sequence: Synthetic oligonucleotide
tttgtttcgtcggagtttta

SEQ ID NO: 8679 - DNA, 19 bp, Artificial Sequence
  Description of Artificial Sequence: Synthetic oligonucleotide
cgggtagttagcgttggag

SEQ ID NO: 8680 - DNA, 19 bp, Artificial Sequence
  Description of Artificial Sequence: Synthetic oligonucleotide
gttgcgttttagcggtagg

SEQ ID NO: 8681 - DNA, 19 bp, Artificial Sequence
  Description of Artificial Sequence: Synthetic oligonucleotide
aacgctcgacaaacaacct

SEQ ID NO: 8682 - DNA, 20 bp, Artificial Sequence
  Description of Artificial Sequence: Synthetic oligonucleotide
ggagaggtttacgtttttcg

SEQ ID NO: 8683 - DNA, 21 bp, Artificial Sequence
  Description of Artificial Sequence: Synthetic oligonucleotide
cgatacactcacactcgctct

SEQ ID NO: 8684 - DNA, 20 bp, Artificial Sequence
  Description of Artificial Sequence: Synthetic oligonucleotide
ttttaggcgtgtattgcgtt

SEQ ID NO: 8685 - DNA, 20 bp, Artificial Sequence
  Description of Artificial Sequence: Synthetic oligonucleotide
tttttaggcgtgtattgcgt

SEQ ID NO: 8686 - DNA, 20 bp, Artificial Sequence
  Description of Artificial Sequence: Synthetic oligonucleotide
caacgcaatacacgcctaaa

SEQ ID NO: 8687 - DNA, 22 bp, Artificial Sequence
  Description of Artificial Sequence: Synthetic oligonucleotide
tttttattcgttggcgtttaag

SEQ ID NO: 8688 - DNA, 20 bp, Artificial Sequence
  Description of Artificial Sequence: Synthetic oligonucleotide
tacgacgatactacccaccc

SEQ ID NO: 8689 - DNA, 24 bp, Artificial Sequence
  Description of Artificial Sequence: Synthetic oligonucleotide
cgaatcgactaatcaccttaaaat

SEQ ID NO: 8690 - DNA, 23 bp, Artificial Sequence
  Description of Artificial Sequence: Synthetic oligonucleotide
attatttttaggcgtgtattgcg

SEQ ID NO: 8691 - DNA, 20 bp, Artificial Sequence
  Description of Artificial Sequence: Synthetic oligonucleotide
aacactacacgcgactccac

SEQ ID NO: 8692 - DNA, 20 bp, Artificial Sequence
  Description of Artificial Sequence: Synthetic oligonucleotide
actctaatcgccgacaaaaa

SEQ ID NO: 8693 - DNA, 19 bp, Artificial Sequence
  Description of Artificial Sequence: Synthetic oligonucleotide
acgcctaaaaataatcgcc

SEQ ID NO: 8694 - DNA, 20 bp, Artificial Sequence
  Description of Artificial Sequence: Synthetic oligonucleotide
gttcgggtagttagcgttgg

SEQ ID NO: 8695 - DNA, 19 bp, Artificial Sequence
  Description of Artificial Sequence: Synthetic oligonucleotide
tccgcacgaatcgactaat

SEQ ID NO: 8696 - DNA, 18 bp, Artificial Sequence
  Description of Artificial Sequence: Synthetic oligonucleotide
gtccgcacgaatcgacta

SEQ ID NO: 8697 - DNA, 20 bp, Artificial Sequence
  Description of Artificial Sequence: Synthetic oligonucleotide
gtatcgtcgtagttttcggc

SEQ ID NO: 8698 - DNA, 19 bp, Artificial Sequence
  Description of Artificial Sequence: Synthetic oligonucleotide
cggcgtatttggttgtttt

SEQ ID NO: 8699 - DNA, 19 bp, Artificial Sequence
  Description of Artificial Sequence: Synthetic oligonucleotide
ttcgggtagttagcgttgg

SEQ ID NO: 8700 - DNA, 19 bp, Artificial Sequence
  Description of Artificial Sequence: Synthetic oligonucleotide
ctccgcgaaaaacgtaaac

SEQ ID NO: 8701 - DNA, 19 bp, Artificial Sequence
  Description of Artificial Sequence: Synthetic oligonucleotide
aaacgctcgacaaacaacc

SEQ ID NO: 8702 - DNA, 19 bp, Artificial Sequence
  Description of Artificial Sequence: Synthetic oligonucleotide
acgttaaacaaccgcaaaa

SEQ ID NO: 8703 - DNA, 18 bp, Artificial Sequence
  Description of Artificial Sequence: Synthetic oligonucleotide
cctaccgctaaaacgcaa

SEQ ID NO: 8704 - DNA, 22 bp, Artificial Sequence
  Description of Artificial Sequence: Synthetic oligonucleotide
aacgctaactacccgaactatt

SEQ ID NO: 8705 - DNA, 20 bp, Artificial Sequence
  Description of Artificial Sequence: Synthetic oligonucleotide
gcgaacttctcgaccactac

SEQ ID NO: 8706 - DNA, 20 bp, Artificial Sequence
  Description of Artificial Sequence: Synthetic oligonucleotide
tttttgtcggcgattagagt

SEQ ID NO: 8707 - DNA, 18 bp, Artificial Sequence
  Description of Artificial Sequence: Synthetic oligonucleotide
cgtggagtcgcgtgtagt

SEQ ID NO: 8708 - DNA, 19 bp, Artificial Sequence
  Description of Artificial Sequence: Synthetic oligonucleotide
tttggttgttttcgcgttt

SEQ ID NO: 8709 - DNA, 19 bp, Artificial Sequence
  Description of Artificial Sequence: Synthetic oligonucleotide
acgctcgacaaacaacctc

SEQ ID NO: 8710 - DNA, 20 bp, Artificial Sequence
  Description of Artificial Sequence: Synthetic oligonucleotide
tcgggaaggtatttgtttcg

SEQ ID NO: 8711 - DNA, 19 bp, Artificial Sequence
  Description of Artificial Sequence: Synthetic oligonucleotide
cgtatttggttgttttcgc

SEQ ID NO: 8712 - DNA, 19 bp, Artificial Sequence
  Description of Artificial Sequence: Synthetic oligonucleotide
gcgtatttggttgttttcg

SEQ ID NO: 8713 - DNA, 21 bp, Artificial Sequence
  Description of Artificial Sequence: Synthetic oligonucleotide
agtcgcgtgtagtgttttaga

SEQ ID NO: 8714 - DNA, 22 bp, Artificial Sequence
  Description of Artificial Sequence: Synthetic oligonucleotide
ttagttttcggcgattattttt

SEQ ID NO: 8715 - DNA, 22 bp, Artificial Sequence
  Description of Artificial Sequence: Synthetic oligonucleotide
tttagttttcggcgattatttt

SEQ ID NO: 8716 - DNA, 18 bp, Artificial Sequence
  Description of Artificial Sequence: Synthetic oligonucleotide
ccgtccaaactatcccgt

SEQ ID NO: 8717 - DNA, 20 bp, Artificial Sequence
  Description of Artificial Sequence: Synthetic oligonucleotide
gaactctaatcgccgacaaa

SEQ ID NO: 8718 - DNA, 19 bp, Artificial Sequence
  Description of Artificial Sequence: Synthetic oligonucleotide
gaagcgtaggttgcgagtt

SEQ ID NO: 8719 - DNA, 22 bp, Artificial Sequence
  Description of Artificial Sequence: Synthetic oligonucleotide
aataatcgccgaaaactaaaca

SEQ ID NO: 8720 - DNA, 18 bp, Artificial Sequence
  Description of Artificial Sequence: Synthetic oligonucleotide
gcgtcgggaaggtatttg

SEQ ID NO: 8721 - DNA, 28 bp, Artificial Sequence
  Description of Artificial Sequence: Synthetic oligonucleotide
tgggtagtatcgtcgtagttttcggcgg

SEQ ID NO: 8722 - DNA, 19 bp, Artificial Sequence
  Description of Artificial Sequence: Synthetic oligonucleotide
tcaccgaactctaatcgcc

SEQ ID NO: 8723 - DNA, 22 bp, Artificial Sequence
  Description of Artificial Sequence: Synthetic oligonucleotide
gagttagtcgggtcgagtttat

SEQ ID NO: 8724 - DNA, 24 bp, Artificial Sequence
  Description of Artificial Sequence: Synthetic oligonucleotide
ttcgggtagggcgagagtcggcgt

SEQ ID NO: 8725 - DNA, 20 bp, Artificial Sequence
  Description of Artificial Sequence: Synthetic oligonucleotide
ctcaccgaactctaatcgcc

SEQ ID NO: 8726 - DNA, 21 bp, Artificial Sequence
  Description of Artificial Sequence: Synthetic oligonucleotide
ttattcgttggcgtttaagtg

SEQ ID NO: 8727 - DNA, 18 bp, Artificial Sequence
  Description of Artificial Sequence: Synthetic oligonucleotide
cgctcgacaaacaacctc

SEQ ID NO: 8728 - DNA, 18 bp, Artificial Sequence
  Description of Artificial Sequence: Synthetic oligonucleotide
tcgccctacccgaaacta

SEQ ID NO: 8729 - DNA, 22 bp, Artificial Sequence
  Description of Artificial Sequence: Synthetic oligonucleotide
ccctaaacgcacgaataaatac

SEQ ID NO: 8730 - DNA, 18 bp, Artificial Sequence
  Description of Artificial Sequence: Synthetic oligonucleotide
atttcggttgtgaggcgt

SEQ ID NO: 8731 - DNA, 21 bp, Artificial Sequence
  Description of Artificial Sequence: Synthetic oligonucleotide
gggttgagtacggcggcgggg

SEQ ID NO: 8732 - DNA, 18 bp, Artificial Sequence
  Description of Artificial Sequence: Synthetic oligonucleotide
ctccgcgaaaaacgtaaa

SEQ ID NO: 8733 - DNA, 18 bp, Artificial Sequence
  Description of Artificial Sequence: Synthetic oligonucleotide
ccgcacgaatcgactaat

SEQ ID NO: 8734 - DNA, 20 bp, Artificial Sequence
  Description of Artificial Sequence: Synthetic oligonucleotide
acgcaatacacgcctaaaaa

SEQ ID NO: 8735 - DNA, 20 bp, Artificial Sequence
  Description of Artificial Sequence: Synthetic oligonucleotide
aacgcaatacacgcctaaaa

SEQ ID NO: 8736 - DNA, 19 bp, Artificial Sequence
  Description of Artificial Sequence: Synthetic oligonucleotide
ctccctaccgctaaaacgc

SEQ ID NO: 8737 - DNA, 23 bp, Artificial Sequence
  Description of Artificial Sequence: Synthetic oligonucleotide
gtttagttttcggcgattatttt

SEQ ID NO: 8738 - DNA, 22 bp, Artificial Sequence
  Description of Artificial Sequence: Synthetic oligonucleotide
cgcgattttcgtttattgtaag

SEQ ID NO: 8739 - DNA, 21 bp, Artificial Sequence
  Description of Artificial Sequence: Synthetic oligonucleotide
cgataaaaccccgtctctact

SEQ ID NO: 8740 - DNA, 38 bp, Artificial Sequence
  Description of Artificial Sequence: Synthetic oligonucleotide
agtagttgggattataggcgttcgttattaagtttagt

SEQ ID NO: 8741 - DNA, 19 bp, Artificial Sequence
  Description of Artificial Sequence: Synthetic oligonucleotide
gcgttcggttcgtattttt

SEQ ID NO: 8742 - DNA, 22 bp, Artificial Sequence
  Description of Artificial Sequence: Synthetic oligonucleotide
tctaaatcgcctaacctcgtaa

SEQ ID NO: 8743 - DNA, 26 bp, Artificial Sequence
  Description of Artificial Sequence: Synthetic oligonucleotide
agtaattacgggttgggcgtggtggt

SEQ ID NO: 8744 - DNA, 22 bp, Artificial Sequence
  Description of Artificial Sequence: Synthetic oligonucleotide
ttttatcgttttagtcgggatg

SEQ ID NO: 8745 - DNA, 19 bp, Artificial Sequence
  Description of Artificial Sequence: Synthetic oligonucleotide
aaaaatacgaaccgaacgc

SEQ ID NO: 8746 - DNA, 33 bp, Artificial Sequence
  Description of Artificial Sequence: Synthetic oligonucleotide
ttcgttcgtttcggttttttaaagtgttgggat

SEQ ID NO: 8747 - DNA, 22 bp, Artificial Sequence
  Description of Artificial Sequence: Synthetic oligonucleotide
agtagagacggggttttatcgt

SEQ ID NO: 8748 - DNA, 22 bp, Artificial Sequence
  Description of Artificial Sequence: Synthetic oligonucleotide
taatctaaatcgcctaacctcg

SEQ ID NO: 8749 - DNA, 22 bp, Artificial Sequence
  Description of Artificial Sequence: Synthetic oligonucleotide
aatctaaatcgcctaacctcgt

SEQ ID NO: 8750 - DNA, 24 bp, Artificial Sequence
  Description of Artificial Sequence: Synthetic oligonucleotide
gcgattttcgtttattgtaagttt

SEQ ID NO: 8751 - DNA, 19 bp, Artificial Sequence
  Description of Artificial Sequence: Synthetic oligonucleotide
gtgattatcgcgttcggtt

SEQ ID NO: 8752 - DNA, 22 bp, Artificial Sequence
  Description of Artificial Sequence: Synthetic oligonucleotide
taaatcgcctaacctcgtaatc

SEQ ID NO: 8753 - DNA, 22 bp, Artificial Sequence
  Description of Artificial Sequence: Synthetic oligonucleotide
acggggttttatcgttttagtc

SEQ ID NO: 8754 - DNA, 22 bp, Artificial Sequence
  Description of Artificial Sequence: Synthetic oligonucleotide
gacggggttttatcgttttagt

SEQ ID NO: 8755 - DNA, 22 bp, Artificial Sequence
  Description of Artificial Sequence: Synthetic oligonucleotide
tagtagagacggggttttatcg

SEQ ID NO: 8756 - DNA, 22 bp, Artificial Sequence
  Description of Artificial Sequence: Synthetic oligonucleotide
agacggggttttatcgttttag

SEQ ID NO: 8757 - DNA, 22 bp, Artificial Sequence
  Description of Artificial Sequence: Synthetic oligonucleotide
atctaaatcgcctaacctcgta

SEQ ID NO: 8758 - DNA, 23 bp, Artificial Sequence
  Description of Artificial Sequence: Synthetic oligonucleotide
ataatctaaatcgcctaacctcg

SEQ ID NO: 8759 - DNA, 19 bp, Artificial Sequence
  Description of Artificial Sequence: Synthetic oligonucleotide
tatcgcgttcggttcgtat

SEQ ID NO: 8760 - DNA, 22 bp, Artificial Sequence
  Description of Artificial Sequence: Synthetic oligonucleotide
tagagacggggttttatcgttt

SEQ ID NO: 8761 - DNA, 22 bp, Artificial Sequence
  Description of Artificial Sequence: Synthetic oligonucleotide
ctaaatcgcctaacctcgtaat

SEQ ID NO: 8762 - DNA, 18 bp, Artificial Sequence
  Description of Artificial Sequence: Synthetic oligonucleotide
tgattatcgcgttcggtt

SEQ ID NO: 8763 - DNA, 20 bp, Artificial Sequence
  Description of Artificial Sequence: Synthetic oligonucleotide
ggattacgaggttaggcgat

SEQ ID NO: 8764 - DNA, 24 bp, Artificial Sequence
  Description of Artificial Sequence: Synthetic oligonucleotide
cccgaataactaaaactacaaacg

SEQ ID NO: 8765 - DNA, 25 bp, Artificial Sequence
  Description of Artificial Sequence: Synthetic oligonucleotide
atttggtaggcgtggtggcgggcgt

SEQ ID NO: 8766 - DNA, 21 bp, Artificial Sequence
  Description of Artificial Sequence: Synthetic oligonucleotide
ggttttatcgttttagtcggg

SEQ ID NO: 8767 - DNA, 21 bp, Artificial Sequence
  Description of Artificial Sequence: Synthetic oligonucleotide
gggttttatcgttttagtcgg

SEQ ID NO: 8768 - DNA, 21 bp, Artificial Sequence
  Description of Artificial Sequence: Synthetic oligonucleotide
cggggttttatcgttttagtc

SEQ ID NO: 8769 - DNA, 21 bp, Artificial Sequence
  Description of Artificial Sequence: Synthetic oligonucleotide
ggggttttatcgttttagtcg

SEQ ID NO: 8770 - DNA, 19 bp, Artificial Sequence
  Description of Artificial Sequence: Synthetic oligonucleotide
gcgcgattttcgtttattg

SEQ ID NO: 8771 - DNA, 22 bp, Artificial Sequence
  Description of Artificial Sequence: Synthetic oligonucleotide
acgataaaaccccgtctctact

SEQ ID NO: 8772 - DNA, 19 bp, Artificial Sequence
  Description of Artificial Sequence: Synthetic oligonucleotide
taaagtgggcggattacga

SEQ ID NO: 8773 - DNA, 22 bp, Artificial Sequence
  Description of Artificial Sequence: Synthetic oligonucleotide
taactaaaactacaaacgcccg

SEQ ID NO: 8774 - DNA, 40 bp, Artificial Sequence
  Description of Artificial Sequence: Synthetic oligonucleotide
ggcgatttagattattttggataatacggtgaaatttcgt

SEQ ID NO: 8775 - DNA, 22 bp, Artificial Sequence
  Description of Artificial Sequence: Synthetic oligonucleotide
gagacggggttttatcgtttta

SEQ ID NO: 8776 - DNA, 21 bp, Artificial Sequence
  Description of Artificial Sequence: Synthetic oligonucleotide
tatcgttttagtcgggatggt

SEQ ID NO: 8777 - DNA, 22 bp, Artificial Sequence
  Description of Artificial Sequence: Synthetic oligonucleotide
gttttatcgttttagtcgggat

SEQ ID NO: 8778 - DNA, 21 bp, Artificial Sequence
  Description of Artificial Sequence: Synthetic oligonucleotide
aaatcgcctaacctcgtaatc

SEQ ID NO: 8779 - DNA, 19 bp, Artificial Sequence
  Description of Artificial Sequence: Synthetic oligonucleotide
ggtagagaaggtacgggcg

SEQ ID NO: 8780 - DNA, 22 bp, Artificial Sequence
  Description of Artificial Sequence: Synthetic oligonucleotide
gaaatatcgctacgaaaccaac

SEQ ID NO: 8781 - DNA, 33 bp, Artificial Sequence
  Description of Artificial Sequence: Synthetic oligonucleotide
tgggagtttgaatgtcgttggttgtcgtttata

SEQ ID NO: 8782 - DNA, 18 bp, Artificial Sequence
  Description of Artificial Sequence: Synthetic oligonucleotide
ggcgcgattttcgtttat

SEQ ID NO: 8783 - DNA, 22 bp, Artificial Sequence
  Description of Artificial Sequence: Synthetic oligonucleotide
ttatcgttttagtcgggatggt

SEQ ID NO: 8784 - DNA, 21 bp, Artificial Sequence
  Description of Artificial Sequence: Synthetic oligonucleotide
gtagagacggggttttatcgt

SEQ ID NO: 8785 - DNA, 23 bp, Artificial Sequence
  Description of Artificial Sequence: Synthetic oligonucleotide
ttagtagagacggggttttatcg

SEQ ID NO: 8786 - DNA, 18 bp, Artificial Sequence
  Description of Artificial Sequence: Synthetic oligonucleotide
aagtgggcggattacgag

SEQ ID NO: 8787 - DNA, 24 bp, Artificial Sequence
  Description of Artificial Sequence: Synthetic oligonucleotide
gattttcgtttattgtaagtttcg

SEQ ID NO: 8788 - DNA, 18 bp, Artificial Sequence
  Description of Artificial Sequence: Synthetic oligonucleotide
atcgcgttcggttcgtat

SEQ ID NO: 8789 - DNA, 21 bp, Artificial Sequence
  Description of Artificial Sequence: Synthetic oligonucleotide
agagacggggttttatcgttt

SEQ ID NO: 8790 - DNA, 22 bp, Artificial Sequence
  Description of Artificial Sequence: Synthetic oligonucleotide
aatctcgatctcctaacctcgt

SEQ ID NO: 8791 - DNA, 22 bp, Artificial Sequence
  Description of Artificial Sequence: Synthetic oligonucleotide
tacgtttagttcgtggttgttg

SEQ ID NO: 8792 - DNA, 49 bp, Artificial Sequence
  Description of Artificial Sequence: Synthetic oligonucleotide
ggcgcggtagttacgtttgtaattttagtattttgggaggtcgaggcgg

SEQ ID NO: 8793 - DNA, 22 bp, Artificial Sequence
  Description of Artificial Sequence: Synthetic oligonucleotide
tcgatctcctaacctcgtaatc

SEQ ID NO: 8794 - DNA, 22 bp, Artificial Sequence
  Description of Artificial Sequence: Synthetic oligonucleotide
tttcaccgttttaaccgaaata

SEQ ID NO: 8795 - DNA, 49 bp, Artificial Sequence
  Description of Artificial Sequence: Synthetic oligonucleotide
tacgtttgtaattttagtattttgggaggtcgaggcgggcggattacga

SEQ ID NO: 8796 - DNA, 22 bp, Artificial Sequence
  Description of Artificial Sequence: Synthetic oligonucleotide
caccgttttaaccgaaataatc

SEQ ID NO: 8797 - DNA, 22 bp, Artificial Sequence
  Description of Artificial Sequence: Synthetic oligonucleotide
tttaatagaagatacgggtcgg

SEQ ID NO: 8798 - DNA, 22 bp, Artificial Sequence
  Description of Artificial Sequence: Synthetic oligonucleotide
ttcaccgttttaaccgaaataa

SEQ ID NO: 8799 - DNA, 22 bp, Artificial Sequence
  Description of Artificial Sequence: Synthetic oligonucleotide
cgatctcctaacctcgtaatcc

SEQ ID NO: 8800 - DNA, 21 bp, Artificial Sequence
  Description of Artificial Sequence: Synthetic oligonucleotide
taatagaagatacgggtcggg

SEQ ID NO: 8801 - DNA, 22 bp, Artificial Sequence
  Description of Artificial Sequence: Synthetic oligonucleotide
tctcgatctcctaacctcgtaa

SEQ ID NO: 8802 - DNA, 22 bp, Artificial Sequence
  Description of Artificial Sequence: Synthetic oligonucleotide
ttacgtttagttcgtggttgtt

SEQ ID NO: 8803 - DNA, 23 bp, Artificial Sequence
  Description of Artificial Sequence: Synthetic oligonucleotide
ctcgatctcctaacctcgtaatc

SEQ ID NO: 8804 - DNA, 23 bp, Artificial Sequence
  Description of Artificial Sequence: Synthetic oligonucleotide
taatctcgatctcctaacctcgt

SEQ ID NO: 8805 - DNA, 21 bp, Artificial Sequence
  Description of Artificial Sequence: Synthetic oligonucleotide
acgtttagttcgtggttgttg

SEQ ID NO: 8806 - DNA, 21 bp, Artificial Sequence
  Description of Artificial Sequence: Synthetic oligonucleotide
aatttcaccgttttaaccgaa

SEQ ID NO: 8807 - DNA, 21 bp, Artificial Sequence
  Description of Artificial Sequence: Synthetic oligonucleotide
atttcaccgttttaaccgaaa

SEQ ID NO: 8808 - DNA, 22 bp, Artificial Sequence
  Description of Artificial Sequence: Synthetic oligonucleotide
ttaatagaagatacgggtcggg

SEQ ID NO: 8809 - DNA, 22 bp, Artificial Sequence
  Description of Artificial Sequence: Synthetic oligonucleotide
caacaaccacgaactaaacgta

SEQ ID NO: 8810 - DNA, 21 bp, Artificial Sequence
  Description of Artificial Sequence: Synthetic oligonucleotide
agtagagacggggttttatcg

SEQ ID NO: 8811 - DNA, 37 bp, Artificial Sequence
  Description of Artificial Sequence: Synthetic oligonucleotide
ttatttaggatggtttggatcgtttgatttcgtgatt

SEQ ID NO: 8812 - DNA, 22 bp, Artificial Sequence
  Description of Artificial Sequence: Synthetic oligonucleotide
taatctcgatctcctaacctcg

SEQ ID NO: 8813 - DNA, 21 bp, Artificial Sequence
  Description of Artificial Sequence: Synthetic oligonucleotide
ttcaccgttttaaccgaaata

SEQ ID NO: 8814 - DNA, 23 bp, Artificial Sequence
  Description of Artificial Sequence: Synthetic oligonucleotide
ttttaatagaagatacgggtcgg

SEQ ID NO: 8815 - DNA, 20 bp, Artificial Sequence
  Description of Artificial Sequence: Synthetic oligonucleotide
cccgacccgtatcttctatt

SEQ ID NO: 8816 - DNA, 22 bp, Artificial Sequence
  Description of Artificial Sequence: Synthetic oligonucleotide
cggggttttatcgtgttattta

SEQ ID NO: 8817 - DNA, 35 bp, Artificial Sequence
  Description of Artificial Sequence: Synthetic oligonucleotide
gtgagttattacgtttagttcgtggttgttggttt

SEQ ID NO: 8818 - DNA, 22 bp, Artificial Sequence
  Description of Artificial Sequence: Synthetic oligonucleotide
cgtgattcgtttattttggttt

SEQ ID NO: 8819 - DNA, 23 bp, Artificial Sequence
  Description of Artificial Sequence: Synthetic oligonucleotide
attacgtttagttcgtggttgtt

SEQ ID NO: 8820 - DNA, 21 bp, Artificial Sequence
  Description of Artificial Sequence: Synthetic oligonucleotide
atctcgatctcctaacctcgt

SEQ ID NO: 8821 - DNA, 21 bp, Artificial Sequence
  Description of Artificial Sequence: Synthetic oligonucleotide
cgcggtagttacgtttgtaat

SEQ ID NO: 8822 - DNA, 25 bp, Artificial Sequence
  Description of Artificial Sequence: Synthetic oligonucleotide
gaggcgggcggattacgaggttagg

SEQ ID NO: 8823 - DNA, 23 bp, Artificial Sequence
  Description of Artificial Sequence: Synthetic oligonucleotide
aatatcgctaactaccgttcaca

SEQ ID NO: 8824 - DNA, 22 bp, Artificial Sequence
  Description of Artificial Sequence: Synthetic oligonucleotide
taggatagttgtcggagtgtcg

SEQ ID NO: 8825 - DNA, 33 bp, Artificial Sequence
  Description of Artificial Sequence: Synthetic oligonucleotide
gaggttagcgggtgttattgtttttttacggtg

SEQ ID NO: 8826 - DNA, 21 bp, Artificial Sequence
  Description of Artificial Sequence: Synthetic oligonucleotide
tcaccgttttaaccgaaataa

SEQ ID NO: 8827 - DNA, 23 bp, Artificial Sequence
  Description of Artificial Sequence: Synthetic oligonucleotide
ggcgtgagttattacgtttagtt

SEQ ID NO: 8828 - DNA, 20 bp, Artificial Sequence
  Description of Artificial Sequence: Synthetic oligonucleotide
aatagaagatacgggtcggg

SEQ ID NO: 8829 - DNA, 22 bp, Artificial Sequence
  Description of Artificial Sequence: Synthetic oligonucleotide
aatttcaccgttttaaccgaaa

SEQ ID NO: 8830 - DNA, 22 bp, Artificial Sequence
  Description of Artificial Sequence: Synthetic oligonucleotide
atctcgatctcctaacctcgta

SEQ ID NO: 8831 - DNA, 24 bp, Artificial Sequence
  Description of Artificial Sequence: Synthetic oligonucleotide
aggcgtgagttattacgtttagtt

SEQ ID NO: 8832 - DNA, 21 bp, Artificial Sequence
  Description of Artificial Sequence: Synthetic oligonucleotide
acgaaatcaaacgatccaaac

SEQ ID NO: 8833 - DNA, 22 bp, Artificial Sequence
  Description of Artificial Sequence: Synthetic oligonucleotide
gggattataggcgttcgttatt

SEQ ID NO: 8834 - DNA, 37 bp, Artificial Sequence
  Description of Artificial Sequence: Synthetic oligonucleotide
ttttagtagagacggggttttatcgtgttatttagga

SEQ ID NO: 8835 - DNA, 23 bp, Artificial Sequence
  Description of Artificial Sequence: Synthetic oligonucleotide
ataatctcgatctcctaacctcg

SEQ ID NO: 8836 - DNA, 20 bp, Artificial Sequence
  Description of Artificial Sequence: Synthetic oligonucleotide
cgaaatcaaacgatccaaac

SEQ ID NO: 8837 - DNA, 21 bp, Artificial Sequence
  Description of Artificial Sequence: Synthetic oligonucleotide
aatacaataacgcgatctccg

SEQ ID NO: 8838 - DNA, 22 bp, Artificial Sequence
  Description of Artificial Sequence: Synthetic oligonucleotide
cgggcgtttgtagttttagtta

SEQ ID NO: 8839 - DNA, 28 bp, Artificial Sequence
  Description of Artificial Sequence: Synthetic oligonucleotide
aggagaatggcgtgaattttggaagcgg

SEQ ID NO: 8840 - DNA, 22 bp, Artificial Sequence
  Description of Artificial Sequence: Synthetic oligonucleotide
tcgtgattcgtttattttggtt

SEQ ID NO: 8841 - DNA, 22 bp, Artificial Sequence
  Description of Artificial Sequence: Synthetic oligonucleotide
ttcgtgattcgtttattttggt

SEQ ID NO: 8842 - DNA, 23 bp, Artificial Sequence
  Description of Artificial Sequence: Synthetic oligonucleotide
aacaaccacgaactaaacgtaat

SEQ ID NO: 8843 - DNA, 23 bp, Artificial Sequence
  Description of Artificial Sequence: Synthetic oligonucleotide
tttttaatagaagatacgggtcg

SEQ ID NO: 8844 - DNA, 23 bp, Artificial Sequence
  Description of Artificial Sequence: Synthetic oligonucleotide
gcggtagttacgtttgtaatttt

SEQ ID NO: 8845 - DNA, 22 bp, Artificial Sequence
  Description of Artificial Sequence: Synthetic oligonucleotide
atatcgctaactaccgttcaca

SEQ ID NO: 8846 - DNA, 20 bp, Artificial Sequence
  Description of Artificial Sequence: Synthetic oligonucleotide
atacaataacgcgatctccg

SEQ ID NO: 8847 - DNA, 22 bp, Artificial Sequence
  Description of Artificial Sequence: Synthetic oligonucleotide
atactcaaaaataacgcgcctc

SEQ ID NO: 8848 - DNA, 21 bp, Artificial Sequence
  Description of Artificial Sequence: Synthetic oligonucleotide
gttgtgaacggtagttagcga

SEQ ID NO: 8849 - DNA, 26 bp, Artificial Sequence
  Description of Artificial Sequence: Synthetic oligonucleotide
ttcgtagtcgggtttcgcgttcgtgt

SEQ ID NO: 8850 - DNA, 22 bp, Artificial Sequence
  Description of Artificial Sequence: Synthetic oligonucleotide
acggggttttatcgtgttattt

SEQ ID NO: 8851 - DNA, 22 bp, Artificial Sequence
  Description of Artificial Sequence: Synthetic oligonucleotide
ctcgatctcctaacctcgtaat

SEQ ID NO: 8852 - DNA, 24 bp, Artificial Sequence
  Description of Artificial Sequence: Synthetic oligonucleotide
tgagttattacgtttagttcgtgg

SEQ ID NO: 8853 - DNA, 23 bp, Artificial Sequence
  Description of Artificial Sequence: Synthetic oligonucleotide
aaaattacaaacgtaactaccgc

SEQ ID NO: 8854 - DNA, 24 bp, Artificial Sequence
  Description of Artificial Sequence: Synthetic oligonucleotide
gtttttaatagaagatacgggtcg

SEQ ID NO: 8855 - DNA, 22 bp, Artificial Sequence
  Description of Artificial Sequence: Synthetic oligonucleotide
agacggggttttatcgtgttat

SEQ ID NO: 8856 - DNA, 24 bp, Artificial Sequence
  Description of Artificial Sequence: Synthetic oligonucleotide
ataatctcgatctcctaacctcgt

SEQ ID NO: 8857 - DNA, 22 bp, Artificial Sequence
  Description of Artificial Sequence: Synthetic oligonucleotide
acaaccacgaactaaacgtaat

SEQ ID NO: 8858 - DNA, 36 bp, Artificial Sequence
  Description of Artificial Sequence: Synthetic oligonucleotide
gttatttaggatggtttggatcgtttgatttcgtga

SEQ ID NO: 8859 - DNA, 20 bp, Artificial Sequence
  Description of Artificial Sequence: Synthetic oligonucleotide
ctcctaacctcgtaatccgc

SEQ ID NO: 8860 - DNA, 23 bp, Artificial Sequence
  Description of Artificial Sequence: Synthetic oligonucleotide
gggtcgggcgcggtagttacgtt

SEQ ID NO: 8861 - DNA, 24 bp, Artificial Sequence
  Description of Artificial Sequence: Synthetic oligonucleotide
cgacccgtatcttctattaaaaac

SEQ ID NO: 8862 - DNA, 32 bp, Artificial Sequence
  Description of Artificial Sequence: Synthetic oligonucleotide
ggcgtgagttattacgtttagttcgtggttgt

SEQ ID NO: 8863 - DNA, 22 bp, Artificial Sequence
  Description of Artificial Sequence: Synthetic oligonucleotide
tttcgtgattcgtttattttgg

SEQ ID NO: 8864 - DNA, 24 bp, Artificial Sequence
  Description of Artificial Sequence: Synthetic oligonucleotide
tattacgtttagttcgtggttgtt

SEQ ID NO: 8865 - DNA, 21 bp, Artificial Sequence
  Description of Artificial Sequence: Synthetic oligonucleotide
gacggggttttatcgtgttat

SEQ ID NO: 8866 - DNA, 22 bp, Artificial Sequence
  Description of Artificial Sequence: Synthetic oligonucleotide
aaattacaaacgtaactaccgc

SEQ ID NO: 8867 - DNA, 20 bp, Artificial Sequence
  Description of Artificial Sequence: Synthetic oligonucleotide
ggatagttgtcggagtgtcg

SEQ ID NO: 8868 - DNA, 23 bp, Artificial Sequence
  Description of Artificial Sequence: Synthetic oligonucleotide
gatttcgtgattcgtttattttg

SEQ ID NO: 8869 - DNA, 20 bp, Artificial Sequence
  Description of Artificial Sequence: Synthetic oligonucleotide
gcgcggtagttacgtttgta

SEQ ID NO: 8870 - DNA, 24 bp, Artificial Sequence
  Description of Artificial Sequence: Synthetic oligonucleotide
cgtgagttattacgtttagttcgt

SEQ ID NO: 8871 - DNA, 21 bp, Artificial Sequence
  Description of Artificial Sequence: Synthetic oligonucleotide
aggatagttgtcggagtgtcg

SEQ ID NO: 8872 - DNA, 25 bp, Artificial Sequence
  Description of Artificial Sequence: Synthetic oligonucleotide
taggcgtgagttattacgtttagtt

SEQ ID NO: 8873 - DNA, 24 bp, Artificial Sequence
  Description of Artificial Sequence: Synthetic oligonucleotide
ttattacgtttagttcgtggttgt

SEQ ID NO: 8874 - DNA, 22 bp, Artificial Sequence
  Description of Artificial Sequence: Synthetic oligonucleotide
tttcggtttattgtaagtttcg

SEQ ID NO: 8875 - DNA, 33 bp, Artificial Sequence
  Description of Artificial Sequence: Synthetic oligonucleotide
gtttttcgagtagttgggattataggcgttcgt

SEQ ID NO: 8876 - DNA, 25 bp, Artificial Sequence
  Description of Artificial Sequence: Synthetic oligonucleotide
ttattacgtttagttcgtggttgtt

SEQ ID NO: 8877 - DNA, 23 bp, Artificial Sequence
  Description of Artificial Sequence: Synthetic oligonucleotide
cgtgagttattacgtttagttcg

SEQ ID NO: 8878 - DNA, 19 bp, Artificial Sequence
  Description of Artificial Sequence: Synthetic oligonucleotide
tcctaacctcgtaatccgc

SEQ ID NO: 8879 - DNA, 21 bp, Artificial Sequence
  Description of Artificial Sequence: Synthetic oligonucleotide
tactcaaaaataacgcgcctc

SEQ ID NO: 8880 - DNA, 21 bp, Artificial Sequence
  Description of Artificial Sequence: Synthetic oligonucleotide
tttcaccgttttaaccgaaat

SEQ ID NO: 8881 - DNA, 23 bp, Artificial Sequence
  Description of Artificial Sequence: Synthetic oligonucleotide
tcggtttattgtaagtttcgttt

SEQ ID NO: 8882 - DNA, 23 bp, Artificial Sequence
  Description of Artificial Sequence: Synthetic oligonucleotide
ttcggtttattgtaagtttcgtt

SEQ ID NO: 8883 - DNA, 25 bp, Artificial Sequence
  Description of Artificial Sequence: Synthetic oligonucleotide
gttattacgtttagttcgtggttgt

SEQ ID NO: 8884 - DNA, 22 bp, Artificial Sequence
  Description of Artificial Sequence: Synthetic oligonucleotide
aaaccaaaataaacgaatcacg

SEQ ID NO: 8885 - DNA, 20 bp, Artificial Sequence
  Description of Artificial Sequence: Synthetic oligonucleotide
gttgggattataggcgttcg

SEQ ID NO: 8886 - DNA, 38 bp, Artificial Sequence
  Description of Artificial Sequence: Synthetic oligonucleotide
ttttatcgtgttatttaggatggtttggatcgtttgat

SEQ ID NO: 8887 - DNA, 20 bp, Artificial Sequence
  Description of Artificial Sequence: Synthetic oligonucleotide
cgtttagttcgtggttgttg

SEQ ID NO: 8888 - DNA, 22 bp, Artificial Sequence
  Description of Artificial Sequence: Synthetic oligonucleotide
ttgatttcgtgattcgtttatt

SEQ ID NO: 8889 - DNA, 22 bp, Artificial Sequence
  Description of Artificial Sequence: Synthetic oligonucleotide
tttgatttcgtgattcgtttat

SEQ ID NO: 8890 - DNA, 23 bp, Artificial Sequence
  Description of Artificial Sequence: Synthetic oligonucleotide
ataggatagttgtcggagtgtcg

SEQ ID NO: 8891 - DNA, 21 bp, Artificial Sequence
  Description of Artificial Sequence: Synthetic oligonucleotide
catactcaaaaataacgcgcc

SEQ ID NO: 8892 - DNA, 24 bp, Artificial Sequence
  Description of Artificial Sequence: Synthetic oligonucleotide
cggtttattgtaagtttcgttttt

SEQ ID NO: 8893 - DNA, 20 bp, Artificial Sequence
  Description of Artificial Sequence: Synthetic oligonucleotide
tctcgatctcctaacctcgt

SEQ ID NO: 8894 - DNA, 22 bp, Artificial Sequence
  Description of Artificial Sequence: Synthetic oligonucleotide
tgggattataggcgttcgttat

SEQ ID NO: 8895 - DNA, 24 bp, Artificial Sequence
  Description of Artificial Sequence: Synthetic oligonucleotide
taaaattacaaacgtaactaccgc

SEQ ID NO: 8896 - DNA, 19 bp, Artificial Sequence
  Description of Artificial Sequence: Synthetic oligonucleotide
ttgggattataggcgttcg

SEQ ID NO: 8897 - DNA, 24 bp, Artificial Sequence
  Description of Artificial Sequence: Synthetic oligonucleotide
gcgtgagttattacgtttagttcg

SEQ ID NO: 8898 - DNA, 20 bp, Artificial Sequence
  Description of Artificial Sequence: Synthetic oligonucleotide
caacaaccacgaactaaacg

SEQ ID NO: 8899 - DNA, 25 bp, Artificial Sequence
  Description of Artificial Sequence: Synthetic oligonucleotide
gtgagttattacgtttagttcgtgg

SEQ ID NO: 8900 - DNA, 25 bp, Artificial Sequence
  Description of Artificial Sequence: Synthetic oligonucleotide
ctaaaattacaaacgtaactaccgc

SEQ ID NO: 8901 - DNA, 22 bp, Artificial Sequence
  Description of Artificial Sequence: Synthetic oligonucleotide
aaatatcgctaactaccgttca

SEQ ID NO: 8902 - DNA, 22 bp, Artificial Sequence
  Description of Artificial Sequence: Synthetic oligonucleotide
gatagttgtcggagtgtcgttg

SEQ ID NO: 8903 - DNA, 24 bp, Artificial Sequence
  Description of Artificial Sequence: Synthetic oligonucleotide
ttataggcgtgagttattacgttt

SEQ ID NO: 8904 - DNA, 21 bp, Artificial Sequence
  Description of Artificial Sequence: Synthetic oligonucleotide
ggatcgtttgatttcgtgatt

SEQ ID NO: 8905 - DNA, 23 bp, Artificial Sequence
  Description of Artificial Sequence: Synthetic oligonucleotide
atttcggtttattgtaagtttcg

SEQ ID NO: 8906 - DNA, 23 bp, Artificial Sequence
  Description of Artificial Sequence: Synthetic oligonucleotide
gcgtgagttattacgtttagttc

SEQ ID NO: 8907 - DNA, 21 bp, Artificial Sequence
  Description of Artificial Sequence: Synthetic oligonucleotide
gtttggatcgtttgatttcgt

SEQ ID NO: 8908 - DNA, 22 bp, Artificial Sequence
  Description of Artificial Sequence: Synthetic oligonucleotide
atttcgtgattcgtttattttg

SEQ ID NO: 8909 - DNA, 20 bp, Artificial Sequence
  Description of Artificial Sequence: Synthetic oligonucleotide
cacgaaatcaaacgatccaa

SEQ ID NO: 8910 - DNA, 35 bp, Artificial Sequence
  Description of Artificial Sequence: Synthetic oligonucleotide
agtagagacggggttttatcgtgttatttaggatg

SEQ ID NO: 8911 - DNA, 20 bp, Artificial Sequence
  Description of Artificial Sequence: Synthetic oligonucleotide
tttggatcgtttgatttcgt

SEQ ID NO: 8912 - DNA, 19 bp, Artificial Sequence
  Description of Artificial Sequence: Synthetic oligonucleotide
tacaataacgcgatctccg

SEQ ID NO: 8913 - DNA, 22 bp, Artificial Sequence
  Description of Artificial Sequence: Synthetic oligonucleotide
ggtttgtttttcgcgtatatgt

SEQ ID NO: 8914 - DNA, 19 bp, Artificial Sequence
  Description of Artificial Sequence: Synthetic oligonucleotide
acgcactaccccgtcttac

SEQ ID NO: 8915 - DNA, 33 bp, Artificial Sequence
  Description of Artificial Sequence: Synthetic oligonucleotide
agggttattcgcgttgcgtttttgttttaggtg

SEQ ID NO: 8916 - DNA, 18 bp, Artificial Sequence
  Description of Artificial Sequence: Synthetic oligonucleotide
cgtcttaccgccctttct

SEQ ID NO: 8917 - DNA, 22 bp, Artificial Sequence
  Description of Artificial Sequence: Synthetic oligonucleotide
gcgaaccttaaaacgctaataa

SEQ ID NO: 8918 - DNA, 22 bp, Artificial Sequence
  Description of Artificial Sequence: Synthetic oligonucleotide
tatttgaagtagaggcgtagcg

SEQ ID NO: 8919 - DNA, 31 bp, Artificial Sequence
  Description of Artificial Sequence: Synthetic oligonucleotide
tgattttgaatatgtgcgcgaggagtaggtt

SEQ ID NO: 8920 - DNA, 22 bp, Artificial Sequence
  Description of Artificial Sequence: Synthetic oligonucleotide
ctcgaaattaacctactcctcg

SEQ ID NO: 8921 - DNA, 22 bp, Artificial Sequence
  Description of Artificial Sequence: Synthetic oligonucleotide
acgtattgtttcgttttgtcgt

SEQ ID NO: 8922 - DNA, 27 bp, Artificial Sequence
  Description of Artificial Sequence: Synthetic oligonucleotide
tttgaagtagaggcgtagcgcggatga

SEQ ID NO: 8923 - DNA, 21 bp, Artificial Sequence
  Description of Artificial Sequence: Synthetic oligonucleotide
cgaaattaacctactcctcgc

SEQ ID NO: 8924 - DNA, 23 bp, Artificial Sequence
  Description of Artificial Sequence: Synthetic oligonucleotide
cgaacaaatataactacccgaaa

SEQ ID NO: 8925 - DNA, 22 bp, Artificial Sequence
  Description of Artificial Sequence: Synthetic oligonucleotide
ttattagcgttttaaggttcgc

SEQ ID NO: 8926 - DNA, 26 bp, Artificial Sequence
  Description of Artificial Sequence: Synthetic oligonucleotide
ggcgtagttgggcggtgtttttggga

SEQ ID NO: 8927 - DNA, 21 bp, Artificial Sequence
  Description of Artificial Sequence: Synthetic oligonucleotide
atttgaagtagaggcgtagcg

SEQ ID NO: 8928 - DNA, 21 bp, Artificial Sequence
  Description of Artificial Sequence: Synthetic oligonucleotide
cgtattgtttcgttttgtcgt

SEQ ID NO: 8929 - DNA, 22 bp, Artificial Sequence
  Description of Artificial Sequence: Synthetic oligonucleotide
tcgaaattaacctactcctcgc

SEQ ID NO: 8930 - DNA, 20 bp, Artificial Sequence
  Description of Artificial Sequence: Synthetic oligonucleotide
tttgaagtagaggcgtagcg

SEQ ID NO: 8931 - DNA, 20 bp, Artificial Sequence
  Description of Artificial Sequence: Synthetic oligonucleotide
ctactcctcgcgcacatatt

SEQ ID NO: 8932 - DNA, 23 bp, Artificial Sequence
  Description of Artificial Sequence: Synthetic oligonucleotide
gtatttgaagtagaggcgtagcg

SEQ ID NO: 8933 - DNA, 23 bp, Artificial Sequence
  Description of Artificial Sequence: Synthetic oligonucleotide
gttattagcgttttaaggttcgc

SEQ ID NO: 8934 - DNA, 20 bp, Artificial Sequence
  Description of Artificial Sequence: Synthetic oligonucleotide
tactcctcgcgcacatattc

SEQ ID NO: 8935 - DNA, 23 bp, Artificial Sequence
  Description of Artificial Sequence: Synthetic oligonucleotide
cgaaccttaaaacgctaataact

SEQ ID NO: 8936 - DNA, 23 bp, Artificial Sequence
  Description of Artificial Sequence: Synthetic oligonucleotide
aacgctaataactacctcgaaat

SEQ ID NO: 8937 - DNA, 21 bp, Artificial Sequence
  Description of Artificial Sequence: Synthetic oligonucleotide
tattagcgttttaaggttcgc

SEQ ID NO: 8938 - DNA, 22 bp, Artificial Sequence
  Description of Artificial Sequence: Synthetic oligonucleotide
ataatccgctaaatacgaacca

SEQ ID NO: 8939 - DNA, 22 bp, Artificial Sequence
  Description of Artificial Sequence: Synthetic oligonucleotide
agttatatgtcggttacgtgcg

SEQ ID NO: 8940 - DNA, 32 bp, Artificial Sequence
  Description of Artificial Sequence: Synthetic oligonucleotide
atcggcgggttttcgacgggaatggggagcgt

SEQ ID NO: 8941 - DNA, 21 bp, Artificial Sequence
  Description of Artificial Sequence: Synthetic oligonucleotide
gttatatgtcggttacgtgcg

SEQ ID NO: 8942 - DNA, 22 bp, Artificial Sequence
  Description of Artificial Sequence: Synthetic oligonucleotide
tatatgtcggttacgtgcgttt

SEQ ID NO: 8943 - DNA, 22 bp, Artificial Sequence
  Description of Artificial Sequence: Synthetic oligonucleotide
tatgtcggttacgtgcgtttat

SEQ ID NO: 8944 - DNA, 22 bp, Artificial Sequence
  Description of Artificial Sequence: Synthetic oligonucleotide
taatccgctaaatacgaaccaa

SEQ ID NO: 8945 - DNA, 22 bp, Artificial Sequence
  Description of Artificial Sequence: Synthetic oligonucleotide
atccgctaaatacgaaccaaaa

SEQ ID NO: 8946 - DNA, 22 bp, Artificial Sequence
  Description of Artificial Sequence: Synthetic oligonucleotide
gtcggttacgtgcgtttatatt

SEQ ID NO: 8947 - DNA, 24 bp, Artificial Sequence
  Description of Artificial Sequence: Synthetic oligonucleotide
ggcgggttttcgacgggaatgggg

SEQ ID NO: 8948 - DNA, 23 bp, Artificial Sequence
  Description of Artificial Sequence: Synthetic oligonucleotide
tataatccgctaaatacgaacca

SEQ ID NO: 8949 - DNA, 23 bp, Artificial Sequence
  Description of Artificial Sequence: Synthetic oligonucleotide
tagttatatgtcggttacgtgcg

SEQ ID NO: 8950 - DNA, 21 bp, Artificial Sequence
  Description of Artificial Sequence: Synthetic oligonucleotide
atatgtcggttacgtgcgttt

SEQ ID NO: 8951 - DNA, 21 bp, Artificial Sequence
  Description of Artificial Sequence: Synthetic oligonucleotide
atgtcggttacgtgcgtttat

SEQ ID NO: 8952 - DNA, 21 bp, Artificial Sequence
  Description of Artificial Sequence: Synthetic oligonucleotide
aatccgctaaatacgaaccaa

SEQ ID NO: 8953 - DNA, 21 bp, Artificial Sequence
  Description of Artificial Sequence: Synthetic oligonucleotide
tccgctaaatacgaaccaaaa

SEQ ID NO: 8954 - DNA, 23 bp, Artificial Sequence
  Description of Artificial Sequence: Synthetic oligonucleotide
ctataccccactacgaaatacga

SEQ ID NO: 8955 - DNA, 21 bp, Artificial Sequence
  Description of Artificial Sequence: Synthetic oligonucleotide
tatatgtcggttacgtgcgtt

SEQ ID NO: 8956 - DNA, 28 bp, Artificial Sequence
  Description of Artificial Sequence: Synthetic oligonucleotide
gggagcgttttggttcgtatttagcgga

SEQ ID NO: 8957 - DNA, 22 bp, Artificial Sequence
  Description of Artificial Sequence: Synthetic oligonucleotide
tataccccactacgaaatacga

SEQ ID NO: 8958 - DNA, 22 bp, Artificial Sequence
  Description of Artificial Sequence: Synthetic oligonucleotide
gctaaatacgaaccaaaacgct

SEQ ID NO: 8959 - DNA, 25 bp, Artificial Sequence
  Description of Artificial Sequence: Synthetic oligonucleotide
atcggcgggttttcgacgggaatgg

SEQ ID NO: 8960 - DNA, 20 bp, Artificial Sequence
  Description of Artificial Sequence: Synthetic oligonucleotide
ttatatgtcggttacgtgcg

SEQ ID NO: 8961 - DNA, 21 bp, Artificial Sequence
  Description of Artificial Sequence: Synthetic oligonucleotide
taatccgctaaatacgaacca

SEQ ID NO: 8962 - DNA, 20 bp, Artificial Sequence
  Description of Artificial Sequence: Synthetic oligonucleotide
ccgctaaatacgaaccaaaa

SEQ ID NO: 8963 - DNA, 20 bp, Artificial Sequence
  Description of Artificial Sequence: Synthetic oligonucleotide
tgtcggttacgtgcgtttat

SEQ ID NO: 8964 - DNA, 21 bp, Artificial Sequence
  Description of Artificial Sequence: Synthetic oligonucleotide
tcggttacgtgcgtttatatt

SEQ ID NO: 8965 - DNA, 24 bp, Artificial Sequence
  Description of Artificial Sequence: Synthetic oligonucleotide
atataatccgctaaatacgaacca

SEQ ID NO: 8966 - DNA, 24 bp, Artificial Sequence
  Description of Artificial Sequence: Synthetic oligonucleotide
atagttatatgtcggttacgtgcg

SEQ ID NO: 8967 - DNA, 22 bp, Artificial Sequence
  Description of Artificial Sequence: Synthetic oligonucleotide
ctaaatacgaaccaaaacgctc

SEQ ID NO: 8968 - DNA, 23 bp, Artificial Sequence
  Description of Artificial Sequence: Synthetic oligonucleotide
atagttatatgtcggttacgtgc

SEQ ID NO: 8969 - DNA, 21 bp, Artificial Sequence
  Description of Artificial Sequence: Synthetic oligonucleotide
ctaaatacgaaccaaaacgct

SEQ ID NO: 8970 - DNA, 21 bp, Artificial Sequence
  Description of Artificial Sequence: Synthetic oligonucleotide
ataccccactacgaaatacga

SEQ ID NO: 8971 - DNA, 20 bp, Artificial Sequence
  Description of Artificial Sequence: Synthetic oligonucleotide
aatccgctaaatacgaacca

SEQ ID NO: 8972 - DNA, 20 bp, Artificial Sequence
  Description of Artificial Sequence: Synthetic oligonucleotide
aatacgaaccaaaacgctcc

SEQ ID NO: 8973 - DNA, 26 bp, Artificial Sequence
  Description of Artificial Sequence: Synthetic oligonucleotide
agttaatcggcgggttttcgacggga

SEQ ID NO: 8974 - DNA, 22 bp, Artificial Sequence
  Description of Artificial Sequence: Synthetic oligonucleotide
atatgtcggttacgtgcgttta

SEQ ID NO: 8975 - DNA, 20 bp, Artificial Sequence
  Description of Artificial Sequence: Synthetic oligonucleotide
ttagttaatcggcgggtttt

SEQ ID NO: 8976 - DNA, 20 bp, Artificial Sequence
  Description of Artificial Sequence: Synthetic oligonucleotide
tttagttaatcggcgggttt

SEQ ID NO: 8977 - DNA, 19 bp, Artificial Sequence
  Description of Artificial Sequence: Synthetic oligonucleotide
atacgaaccaaaacgctcc

SEQ ID NO: 8978 - DNA, 20 bp, Artificial Sequence
  Description of Artificial Sequence: Synthetic oligonucleotide
tagttaatcggcgggttttc

SEQ ID NO: 8979 - DNA, 19 bp, Artificial Sequence
  Description of Artificial Sequence: Synthetic oligonucleotide
gtcggttacgtgcgtttat

SEQ ID NO: 8980 - DNA, 23 bp, Artificial Sequence
  Description of Artificial Sequence: Synthetic oligonucleotide
cgaggtagttttattgtttagcg

SEQ ID NO: 8981 - DNA, 22 bp, Artificial Sequence
  Description of Artificial Sequence: Synthetic oligonucleotide
atccataatatccgaaacgaac

SEQ ID NO: 8982 - DNA, 29 bp, Artificial Sequence
  Description of Artificial Sequence: Synthetic oligonucleotide
ttcgtcggtttttgtttcgcgtttaggga

SEQ ID NO: 8983 - DNA, 21 bp, Artificial Sequence
  Description of Artificial Sequence: Synthetic oligonucleotide
cataatatccgaaacgaacga

SEQ ID NO: 8984 - DNA, 22 bp, Artificial Sequence
  Description of Artificial Sequence: Synthetic oligonucleotide
gttcgtttcggatattatggat

SEQ ID NO: 8985 - DNA, 20 bp, Artificial Sequence
  Description of Artificial Sequence: Synthetic oligonucleotide
gaacactcaccgatctacgc

SEQ ID NO: 8986 - DNA, 33 bp, Artificial Sequence
  Description of Artificial Sequence: Synthetic oligonucleotide
ttggtggtacgtagtttggggattttgtttcgt

SEQ ID NO: 8987 - DNA, 23 bp, Artificial Sequence
  Description of Artificial Sequence: Synthetic oligonucleotide
tatccataatatccgaaacgaac

SEQ ID NO: 8988 - DNA, 24 bp, Artificial Sequence
  Description of Artificial Sequence: Synthetic oligonucleotide
tcgaggtagttttattgtttagcg

SEQ ID NO: 8989 - DNA, 20 bp, Artificial Sequence
  Description of Artificial Sequence: Synthetic oligonucleotide
gtttcgcgtttagggatttt

SEQ ID NO: 8990 - DNA, 22 bp, Artificial Sequence
  Description of Artificial Sequence: Synthetic oligonucleotide
caaactacgacgaacactcacc

SEQ ID NO: 8991 - DNA, 29 bp, Artificial Sequence
  Description of Artificial Sequence: Synthetic oligonucleotide
ttgtttcgtgtcgttgagtttggcgtaga

SEQ ID NO: 8992 - DNA, 22 bp, Artificial Sequence
  Description of Artificial Sequence: Synthetic oligonucleotide
ccaaactacgacgaacactcac

SEQ ID NO: 8993 - DNA, 21 bp, Artificial Sequence
  Description of Artificial Sequence: Synthetic oligonucleotide
ccataatatccgaaacgaacg

SEQ ID NO: 8994 - DNA, 21 bp, Artificial Sequence
  Description of Artificial Sequence: Synthetic oligonucleotide
tccataatatccgaaacgaac

SEQ ID NO: 8995 - DNA, 21 bp, Artificial Sequence
  Description of Artificial Sequence: Synthetic oligonucleotide
gacgaacactcaccgatctac

SEQ ID NO: 8996 - DNA, 38 bp, Artificial Sequence
  Description of Artificial Sequence: Synthetic oligonucleotide
ttttcgttcgtttcggatattatggataagttttggtg

SEQ ID NO: 8997 - DNA, 19 bp, Artificial Sequence
  Description of Artificial Sequence: Synthetic oligonucleotide
accgatctacgccaaactc

SEQ ID NO: 8998 - DNA, 23 bp, Artificial Sequence
  Description of Artificial Sequence: Synthetic oligonucleotide
tcgtcgtagtttgggtagtaaga

SEQ ID NO: 8999 - DNA, 19 bp, Artificial Sequence
  Description of Artificial Sequence: Synthetic oligonucleotide
aaaaccgactcaaccgaaa

SEQ ID NO: 9000 - DNA, 22 bp, Artificial Sequence
  Description of Artificial Sequence: Synthetic oligonucleotide
ggtgcggggtgtttagcgcgga

SEQ ID NO: 9001 - DNA, 20 bp, Artificial Sequence
  Description of Artificial Sequence: Synthetic oligonucleotide
gtttttgtttcgcgtttagg

SEQ ID NO: 9002 - DNA, 20 bp, Artificial Sequence
  Description of Artificial Sequence: Synthetic oligonucleotide
ggtttttgtttcgcgtttag

SEQ ID NO: 9003 - DNA, 20 bp, Artificial Sequence
  Description of Artificial Sequence: Synthetic oligonucleotide
cgaacactcaccgatctacg

SEQ ID NO: 9004 - DNA, 21 bp, Artificial Sequence
  Description of Artificial Sequence: Synthetic oligonucleotide
aaactacgacgaacactcacc

SEQ ID NO: 9005 - DNA, 20 bp, Artificial Sequence
  Description of Artificial Sequence: Synthetic oligonucleotide
tttcgcgtttagggattttt

SEQ ID NO: 9006 - DNA, 19 bp, Artificial Sequence
  Description of Artificial Sequence: Synthetic oligonucleotide
cgatctacgccaaactcaa

SEQ ID NO: 9007 - DNA, 21 bp, Artificial Sequence
  Description of Artificial Sequence: Synthetic oligonucleotide
ttcgtttcggatattatggat

SEQ ID NO: 9008 - DNA, 23 bp, Artificial Sequence
  Description of Artificial Sequence: Synthetic oligonucleotide
ttcgtcgtagtttgggtagtaag

SEQ ID NO: 9009 - DNA, 19 bp, Artificial Sequence
  Description of Artificial Sequence: Synthetic oligonucleotide
aaaccgactcaaccgaaaa

SEQ ID NO: 9010 - DNA, 21 bp, Artificial Sequence
  Description of Artificial Sequence: Synthetic oligonucleotide
ccaaactacgacgaacactca

SEQ ID NO: 9011 - DNA, 19 bp, Artificial Sequence
  Description of Artificial Sequence: Synthetic oligonucleotide
acactcaccgatctacgcc

SEQ ID NO: 9012 - DNA, 21 bp, Artificial Sequence
  Description of Artificial Sequence: Synthetic oligonucleotide
cgttcgtttcggatattatgg

SEQ ID NO: 9013 - DNA, 22 bp, Artificial Sequence
  Description of Artificial Sequence: Synthetic oligonucleotide
tacctcgtaccgctaaacctaa

SEQ ID NO: 9014 - DNA, 22 bp, Artificial Sequence
  Description of Artificial Sequence: Synthetic oligonucleotide
gttcgcgttgagtatttcgtat

SEQ ID NO: 9015 - DNA, 30 bp, Artificial Sequence
  Description of Artificial Sequence: Synthetic oligonucleotide
tgtttaggttgcggcgggtatttatcgatt

SEQ ID NO: 9016 - DNA, 22 bp, Artificial Sequence
  Description of Artificial Sequence: Synthetic oligonucleotide
ctacctcgtaccgctaaaccta

SEQ ID NO: 9017 - DNA, 22 bp, Artificial Sequence
  Description of Artificial Sequence: Synthetic oligonucleotide
tcgcgttgagtatttcgtattt

SEQ ID NO: 9018 - DNA, 22 bp, Artificial Sequence
  Description of Artificial Sequence: Synthetic oligonucleotide
ttcgcgttgagtatttcgtatt

SEQ ID NO: 9019 - DNA, 22 bp, Artificial Sequence
  Description of Artificial Sequence: Synthetic oligonucleotide
aactctacctcgtaccgctaaa

SEQ ID NO: 9020 - DNA, 22 bp, Artificial Sequence
  Description of Artificial Sequence: Synthetic oligonucleotide
aaactctacctcgtaccgctaa

SEQ ID NO: 9021 - DNA, 22 bp, Artificial Sequence
  Description of Artificial Sequence: Synthetic oligonucleotide
cgcgttgagtatttcgtattta

SEQ ID NO: 9022 - DNA, 22 bp, Artificial Sequence
  Description of Artificial Sequence: Synthetic oligonucleotide
acctcgtaccgctaaacctaac

SEQ ID NO: 9023 - DNA, 21 bp, Artificial Sequence
  Description of Artificial Sequence: Synthetic oligonucleotide
cctcgtaccgctaaacctaac

SEQ ID NO: 9024 - DNA, 23 bp, Artificial Sequence
  Description of Artificial Sequence: Synthetic oligonucleotide
cgcgttgagtatttcgtatttat

SEQ ID NO: 9025 - DNA, 22 bp, Artificial Sequence
  Description of Artificial Sequence: Synthetic oligonucleotide
attttacgattcgatcatcctc

SEQ ID NO: 9026 - DNA, 22 bp, Artificial Sequence
  Description of Artificial Sequence: Synthetic oligonucleotide
ttttgcgtttagagacgtattg

SEQ ID NO: 9027 - DNA, 27 bp, Artificial Sequence
  Description of Artificial Sequence: Synthetic oligonucleotide
ttttcgttggtttcgcggcgttaggat

SEQ ID NO: 9028 - DNA, 22 bp, Artificial Sequence
  Description of Artificial Sequence: Synthetic oligonucleotide
actctacctcgtaccgctaaac

SEQ ID NO: 9029 - DNA, 22 bp, Artificial Sequence
  Description of Artificial Sequence: Synthetic oligonucleotide
taaaaactctacctcgtaccgc

SEQ ID NO: 9030 - DNA, 21 bp, Artificial Sequence
  Description of Artificial Sequence: Synthetic oligonucleotide
ttagggtcgatttagtcggag

SEQ ID NO: 9031 - DNA, 28 bp, Artificial Sequence
  Description of Artificial Sequence: Synthetic oligonucleotide
gtcgtcgggttcgcgttgagtatttcgt

SEQ ID NO: 9032 - DNA, 22 bp, Artificial Sequence
  Description of Artificial Sequence: Synthetic oligonucleotide
tctacctcgtaccgctaaacct

SEQ ID NO: 9033 - DNA, 22 bp, Artificial Sequence
  Description of Artificial Sequence: Synthetic oligonucleotide
ctctacctcgtaccgctaaacc

SEQ ID NO: 9034 - DNA, 22 bp, Artificial Sequence
  Description of Artificial Sequence: Synthetic oligonucleotide
aaaaactctacctcgtaccgct

SEQ ID NO: 9035 - DNA, 22 bp, Artificial Sequence
  Description of Artificial Sequence: Synthetic oligonucleotide
aattttacgattcgatcatcct

SEQ ID NO: 9036 - DNA, 22 bp, Artificial Sequence
  Description of Artificial Sequence: Synthetic oligonucleotide
tttagggtcgatttagtcggag

SEQ ID NO: 9037 - DNA, 23 bp, Artificial Sequence
  Description of Artificial Sequence: Synthetic oligonucleotide
aactctacctcgtaccgctaaac

SEQ ID NO: 9038 - DNA, 22 bp, Artificial Sequence
  Description of Artificial Sequence: Synthetic oligonucleotide
ttttacgattcgatcatcctct

SEQ ID NO: 9039 - DNA, 22 bp, Artificial Sequence
  Description of Artificial Sequence: Synthetic oligonucleotide
tttttgcgtttagagacgtatt

SEQ ID NO: 9040 - DNA, 27 bp, Artificial Sequence
  Description of Artificial Sequence: Synthetic oligonucleotide
tttttcgttggtttcgcggcgttagga

SEQ ID NO: 9041 - DNA, 23 bp, Artificial Sequence
  Description of Artificial Sequence: Synthetic oligonucleotide
gtttttgcgtttagagacgtatt

SEQ ID NO: 9042 - DNA, 23 bp, Artificial Sequence
  Description of Artificial Sequence: Synthetic oligonucleotide
tttttgcgtttagagacgtattg

SEQ ID NO: 9043 - DNA, 22 bp, Artificial Sequence
  Description of Artificial Sequence: Synthetic oligonucleotide
tttgcgtttagagacgtattgg

SEQ ID NO: 9044 - DNA, 21 bp, Artificial Sequence
  Description of Artificial Sequence: Synthetic oligonucleotide
ctcgtaccgctaaacctaacg

SEQ ID NO: 9045 - DNA, 21 bp, Artificial Sequence
  Description of Artificial Sequence: Synthetic oligonucleotide
cgagttttattggtttttgcg

SEQ ID NO: 9046 - DNA, 23 bp, Artificial Sequence
  Description of Artificial Sequence: Synthetic oligonucleotide
cctaaaaactctacctcgtaccg

SEQ ID NO: 9047 - DNA, 20 bp, Artificial Sequence
  Description of Artificial Sequence: Synthetic oligonucleotide
tcgtaccgctaaacctaacg

SEQ ID NO: 9048 - DNA, 23 bp, Artificial Sequence
  Description of Artificial Sequence: Synthetic oligonucleotide
ctaaaaactctacctcgtaccgc

SEQ ID NO: 9049 - DNA, 21 bp, Artificial Sequence
  Description of Artificial Sequence: Synthetic oligonucleotide
aaaactctacctcgtaccgct

SEQ ID NO: 9050 - DNA, 19 bp, Artificial Sequence
  Description of Artificial Sequence: Synthetic oligonucleotide
gggttcgcgttgagtattt

SEQ ID NO: 9051 - DNA, 20 bp, Artificial Sequence
  Description of Artificial Sequence: Synthetic oligonucleotide
tagggtcgatttagtcggag

SEQ ID NO: 9052 - DNA, 24 bp, Artificial Sequence
  Description of Artificial Sequence: Synthetic oligonucleotide
ggtttttgcgtttagagacgtatt

SEQ ID NO: 9053 - DNA, 19 bp, Artificial Sequence
  Description of Artificial Sequence: Synthetic oligonucleotide
cgatttagtcggaggggtt

SEQ ID NO: 9054 - DNA, 21 bp, Artificial Sequence
  Description of Artificial Sequence: Synthetic oligonucleotide
acctcgtaccgctaaacctaa

SEQ ID NO: 9055 - DNA, 24 bp, Artificial Sequence
  Description of Artificial Sequence: Synthetic oligonucleotide
gattaagattttcggttagtttcg

SEQ ID NO: 9056 - DNA, 22 bp, Artificial Sequence
  Description of Artificial Sequence: Synthetic oligonucleotide
aaaattcactacaacgctacgc

SEQ ID NO: 9057 - DNA, 36 bp, Artificial Sequence
  Description of Artificial Sequence: Synthetic oligonucleotide
ttcgggttattacgttttttatgtgattcgtttggg

SEQ ID NO: 9058 - DNA, 22 bp, Artificial Sequence
  Description of Artificial Sequence: Synthetic oligonucleotide
ttaagattttcggttagtttcg

SEQ ID NO: 9059 - DNA, 37 bp, Artificial Sequence
  Description of Artificial Sequence: Synthetic oligonucleotide
tttttatgtgattcgtttgggtaacgtcgaatttagt

SEQ ID NO: 9060 - DNA, 20 bp, Artificial Sequence
  Description of Artificial Sequence: Synthetic oligonucleotide
gcggacgtaatagtcgagaa

SEQ ID NO: 9061 - DNA, 22 bp, Artificial Sequence
  Description of Artificial Sequence: Synthetic oligonucleotide
aaaaacgtaataacccgaaaaa

SEQ ID NO: 9062 - DNA, 35 bp, Artificial Sequence
  Description of Artificial Sequence: Synthetic oligonucleotide
aggagttgggattaagattttcggttagtttcgta

SEQ ID NO: 9063 - DNA, 20 bp, Artificial Sequence
  Description of Artificial Sequence: Synthetic oligonucleotide
tttttcggttttgacggtat

SEQ ID NO: 9064 - DNA, 22 bp, Artificial Sequence
  Description of Artificial Sequence: Synthetic oligonucleotide
tattctcgactattacgtccgc

SEQ ID NO: 9065 - DNA, 34 bp, Artificial Sequence
  Description of Artificial Sequence: Synthetic oligonucleotide
ttcgtatttgaatttgtaggcgagttgtttcgag

SEQ ID NO: 9066 - DNA, 24 bp, Artificial Sequence
  Description of Artificial Sequence: Synthetic oligonucleotide
gattttcggttagtttcgtatttt

SEQ ID NO: 9067 - DNA, 20 bp, Artificial Sequence
  Description of Artificial Sequence: Synthetic oligonucleotide
gtgcggacgtaatagtcgag

SEQ ID NO: 9068 - DNA, 22 bp, Artificial Sequence
  Description of Artificial Sequence: Synthetic oligonucleotide
tttcggttagtttcgtattttt

SEQ ID NO: 9069 - DNA, 22 bp, Artificial Sequence
  Description of Artificial Sequence: Synthetic oligonucleotide
ttttcggttagtttcgtatttt

SEQ ID NO: 9070 - DNA, 22 bp, Artificial Sequence
  Description of Artificial Sequence: Synthetic oligonucleotide
taagattttcggttagtttcgt

SEQ ID NO: 9071 - DNA, 21 bp, Artificial Sequence
  Description of Artificial Sequence: Synthetic oligonucleotide
cgtatttgaatttgtaggcga

SEQ ID NO: 9072 - DNA, 24 bp, Artificial Sequence
  Description of Artificial Sequence: Synthetic oligonucleotide
cgaaactaaccgaaaatcttaatc

SEQ ID NO: 9073 - DNA, 27 bp, Artificial Sequence
  Description of Artificial Sequence: Synthetic oligonucleotide
ggggaagaattttaggcgtgcggacgt

SEQ ID NO: 9074 - DNA, 21 bp, Artificial Sequence
  Description of Artificial Sequence: Synthetic oligonucleotide
tcgtatttgaatttgtaggcg

SEQ ID NO: 9075 - DNA, 23 bp, Artificial Sequence
  Description of Artificial Sequence: Synthetic oligonucleotide
attaagattttcggttagtttcg

SEQ ID NO: 9076 - DNA, 38 bp, Artificial Sequence
  Description of Artificial Sequence: Synthetic oligonucleotide
gttttttatgtgattcgtttgggtaacgtcgaatttag

SEQ ID NO: 9077 - DNA, 25 bp, Artificial Sequence
  Description of Artificial Sequence: Synthetic oligonucleotide
agattttcggttagtttcgtatttt

SEQ ID NO: 9078 - DNA, 25 bp, Artificial Sequence
  Description of Artificial Sequence: Synthetic oligonucleotide
aagattttcggttagtttcgtattt

SEQ ID NO: 9079 - DNA, 22 bp, Artificial Sequence
  Description of Artificial Sequence: Synthetic oligonucleotide
ttcgtatttgaatttgtaggcg

SEQ ID NO: 9080 - DNA, 22 bp, Artificial Sequence
  Description of Artificial Sequence: Synthetic oligonucleotide
ttttcggttttgacggtatagt

SEQ ID NO: 9081 - DNA, 19 bp, Artificial Sequence
  Description of Artificial Sequence: Synthetic oligonucleotide
cgcacgcctaaaattcttc

SEQ ID NO: 9082 - DNA, 22 bp, Artificial Sequence
  Description of Artificial Sequence: Synthetic oligonucleotide
tttttcggttttgacggtatag

SEQ ID NO: 9083 - DNA, 22 bp, Artificial Sequence
  Description of Artificial Sequence: Synthetic oligonucleotide
aaaaattcactacaacgctacg

SEQ ID NO: 9084 - DNA, 22 bp, Artificial Sequence
  Description of Artificial Sequence: Synthetic oligonucleotide
tcggttttgacggtatagtgat

SEQ ID NO: 9085 - DNA, 22 bp, Artificial Sequence
  Description of Artificial Sequence: Synthetic oligonucleotide
acgaaactaaccgaaaatctta

SEQ ID NO: 9086 - DNA, 21 bp, Artificial Sequence
  Description of Artificial Sequence: Synthetic oligonucleotide
attctcgactattacgtccgc

SEQ ID NO: 9087 - DNA, 21 bp, Artificial Sequence
  Description of Artificial Sequence: Synthetic oligonucleotide
aaattcactacaacgctacgc

SEQ ID NO: 9088 - DNA, 20 bp, Artificial Sequence
  Description of Artificial Sequence: Synthetic oligonucleotide
tgcggacgtaatagtcgaga

SEQ ID NO: 9089 - DNA, 22 bp, Artificial Sequence
  Description of Artificial Sequence: Synthetic oligonucleotide
tttcggttttgacggtatagtg

SEQ ID NO: 9090 - DNA, 21 bp, Artificial Sequence
  Description of Artificial Sequence: Synthetic oligonucleotide
ttcggttttgacggtatagtg

SEQ ID NO: 9091 - DNA, 20 bp, Artificial Sequence
  Description of Artificial Sequence: Synthetic oligonucleotide
ttctcgactattacgtccgc

SEQ ID NO: 9092 - DNA, 23 bp, Artificial Sequence
  Description of Artificial Sequence: Synthetic oligonucleotide
tacgaaactaaccgaaaatctta

SEQ ID NO: 9093 - DNA, 20 bp, Artificial Sequence
  Description of Artificial Sequence: Synthetic oligonucleotide
aacgctacgcgactaaattc

SEQ ID NO: 9094 - DNA, 21 bp, Artificial Sequence
  Description of Artificial Sequence: Synthetic oligonucleotide
caacgctacgcgactaaattc

SEQ ID NO: 9095 - DNA, 21 bp, Artificial Sequence
  Description of Artificial Sequence: Synthetic oligonucleotide
aaaacgtaataacccgaaaaa

SEQ ID NO: 9096 - DNA, 17 bp, Artificial Sequence
  Description of Artificial Sequence: Synthetic oligonucleotide
ccgcacgcctaaaattc

SEQ ID NO: 9097 - DNA, 24 bp, Artificial Sequence
  Description of Artificial Sequence: Synthetic oligonucleotide
atacgaaactaaccgaaaatctta

SEQ ID NO: 9098 - DNA, 19 bp, Artificial Sequence
  Description of Artificial Sequence: Synthetic oligonucleotide
cactacaacgctacgcgac

SEQ ID NO: 9099 - DNA, 22 bp, Artificial Sequence
  Description of Artificial Sequence: Synthetic oligonucleotide
tcctcctcgactctaacgatac

SEQ ID NO: 9100 - DNA, 20 bp, Artificial Sequence
  Description of Artificial Sequence: Synthetic oligonucleotide
taatgttttcggttgttgcg

SEQ ID NO: 9101 - DNA, 32 bp, Artificial Sequence
  Description of Artificial Sequence: Synthetic oligonucleotide
ggggtagttcgtttgtaagtttaaatgcgggt

SEQ ID NO: 9102 - DNA, 18 bp, Artificial Sequence
  Description of Artificial Sequence: Synthetic oligonucleotide
atgttttcggttgttgcg

SEQ ID NO: 9103 - DNA, 22 bp, Artificial Sequence
  Description of Artificial Sequence: Synthetic oligonucleotide
aatctcctcctcgactctaacg

SEQ ID NO: 9104 - DNA, 21 bp, Artificial Sequence
  Description of Artificial Sequence: Synthetic oligonucleotide
ctcctcctcgactctaacgat

SEQ ID NO: 9105 - DNA, 21 bp, Artificial Sequence
  Description of Artificial Sequence: Synthetic oligonucleotide
atctcctcctcgactctaacg

SEQ ID NO: 9106 - DNA, 19 bp, Artificial Sequence
  Description of Artificial Sequence: Synthetic oligonucleotide
aatgttttcggttgttgcg

SEQ ID NO: 9107 - DNA, 22 bp, Artificial Sequence
  Description of Artificial Sequence: Synthetic oligonucleotide
tctcctcctcgactctaacgat

SEQ ID NO: 9108 - DNA, 19 bp, Artificial Sequence
  Description of Artificial Sequence: Synthetic oligonucleotide
atgttttcggttgttgcgt

SEQ ID NO: 9109 - DNA, 19 bp, Artificial Sequence
  Description of Artificial Sequence: Synthetic oligonucleotide
gttttcggttgttgcgttc

SEQ ID NO: 9110 - DNA, 18 bp, Artificial Sequence
  Description of Artificial Sequence: Synthetic oligonucleotide
ttttcggttgttgcgttc

SEQ ID NO: 9111 - DNA, 22 bp, Artificial Sequence
  Description of Artificial Sequence: Synthetic oligonucleotide
atctcctcctcgactctaacga

SEQ ID NO: 9112 - DNA, 17 bp, Artificial Sequence
  Description of Artificial Sequence: Synthetic oligonucleotide
tgttttcggttgttgcg

SEQ ID NO: 9113 - DNA, 22 bp, Artificial Sequence
  Description of Artificial Sequence: Synthetic oligonucleotide
acgtgagttgtagggaaacgta

SEQ ID NO: 9114 - DNA, 22 bp, Artificial Sequence
  Description of Artificial Sequence: Synthetic oligonucleotide
ctaaattccgaaacgacgataa

SEQ ID NO: 9115 - DNA, 33 bp, Artificial Sequence
  Description of Artificial Sequence: Synthetic oligonucleotide
gggcggtttttaggtgttgtcgtcgttatcgtt

SEQ ID NO: 9116 - DNA, 22 bp, Artificial Sequence
  Description of Artificial Sequence: Synthetic oligonucleotide
cgtgagttgtagggaaacgtag

SEQ ID NO: 9117 - DNA, 33 bp, Artificial Sequence
  Description of Artificial Sequence: Synthetic oligonucleotide
ggcggtttttaggtgttgtcgtcgttatcgtta

SEQ ID NO: 9118 - DNA, 22 bp, Artificial Sequence
  Description of Artificial Sequence: Synthetic oligonucleotide
tagtttttgagttaatcggcgt

SEQ ID NO: 9119 - DNA, 21 bp, Artificial Sequence
  Description of Artificial Sequence: Synthetic oligonucleotide
ataataaaacgctcacgaccc

SEQ ID NO: 9120 - DNA, 28 bp, Artificial Sequence
  Description of Artificial Sequence: Synthetic oligonucleotide
atcgtgaaggtcgaacgcgttttttcgg

SEQ ID NO: 9121 - DNA, 22 bp, Artificial Sequence
  Description of Artificial Sequence: Synthetic oligonucleotide
tccgaaacgacgataaaaataa

SEQ ID NO: 9122 - DNA, 22 bp, Artificial Sequence
  Description of Artificial Sequence: Synthetic oligonucleotide
taaattccgaaacgacgataaa

SEQ ID NO: 9123 - DNA, 22 bp, Artificial Sequence
  Description of Artificial Sequence: Synthetic oligonucleotide
ttccgaaacgacgataaaaata

SEQ ID NO: 9124 - DNA, 22 bp, Artificial Sequence
  Description of Artificial Sequence: Synthetic oligonucleotide
aataataaaacgctcacgaccc

SEQ ID NO: 9125 - DNA, 21 bp, Artificial Sequence
  Description of Artificial Sequence: Synthetic oligonucleotide
tacgtgagttgtagggaaacg

SEQ ID NO: 9126 - DNA, 22 bp, Artificial Sequence
  Description of Artificial Sequence: Synthetic oligonucleotide
ttacgtgagttgtagggaaacg

SEQ ID NO: 9127 - DNA, 22 bp, Artificial Sequence
  Description of Artificial Sequence: Synthetic oligonucleotide
attccgaaacgacgataaaaat

SEQ ID NO: 9128 - DNA, 21 bp, Artificial Sequence
  Description of Artificial Sequence: Synthetic oligonucleotide
tcgggtttacgtgagttgtag

SEQ ID NO: 9129 - DNA, 22 bp, Artificial Sequence
  Description of Artificial Sequence: Synthetic oligonucleotide
ttcgggtttacgtgagttgtag

SEQ ID NO: 9130 - DNA, 22 bp, Artificial Sequence
  Description of Artificial Sequence: Synthetic oligonucleotide
gtgttcgatttttcgtcgttat

SEQ ID NO: 9131 - DNA, 21 bp, Artificial Sequence
  Description of Artificial Sequence: Synthetic oligonucleotide
acgcaaaccgatccattatac

SEQ ID NO: 9132 - DNA, 36 bp, Artificial Sequence
  Description of Artificial Sequence: Synthetic oligonucleotide
ggatttgcgtgtggtattgtttaagtttttcgtttt

SEQ ID NO: 9133 - DNA, 22 bp, Artificial Sequence
  Description of Artificial Sequence: Synthetic oligonucleotide
aaaaataataaaacgctcacga

SEQ ID NO: 9134 - DNA, 21 bp, Artificial Sequence
  Description of Artificial Sequence: Synthetic oligonucleotide
aaaaacgaaaactccatacgc

SEQ ID NO: 9135 - DNA, 20 bp, Artificial Sequence
  Description of Artificial Sequence: Synthetic oligonucleotide
cgcaaaccgatccattatac

SEQ ID NO: 9136 - DNA, 21 bp, Artificial Sequence
  Description of Artificial Sequence: Synthetic oligonucleotide
agtttttgagttaatcggcgt

SEQ ID NO: 9137 - DNA, 20 bp, Artificial Sequence
  Description of Artificial Sequence: Synthetic oligonucleotide
taataaaacgctcacgaccc

SEQ ID NO: 9138 - DNA, 21 bp, Artificial Sequence
  Description of Artificial Sequence: Synthetic oligonucleotide
aattccgaaacgacgataaaa

SEQ ID NO: 9139 - DNA, 21 bp, Artificial Sequence
  Description of Artificial Sequence: Synthetic oligonucleotide
aaattccgaaacgacgataaa

SEQ ID NO: 9140 - DNA, 21 bp, Artificial Sequence
  Description of Artificial Sequence: Synthetic oligonucleotide
aaacctaaattccgaaacgac

SEQ ID NO: 9141 - DNA, 22 bp, Artificial Sequence
  Description of Artificial Sequence: Synthetic oligonucleotide
tgttcgatttttcgtcgttatt

SEQ ID NO: 9142 - DNA, 22 bp, Artificial Sequence
  Description of Artificial Sequence: Synthetic oligonucleotide
caaacctaaattccgaaacgac

SEQ ID NO: 9143 - DNA, 20 bp, Artificial Sequence
  Description of Artificial Sequence: Synthetic oligonucleotide
taatttttcgaggttttgcg

SEQ ID NO: 9144 - DNA, 22 bp, Artificial Sequence
  Description of Artificial Sequence: Synthetic oligonucleotide
acgtttccctacaactcacgta

SEQ ID NO: 9145 - DNA, 24 bp, Artificial Sequence
  Description of Artificial Sequence: Synthetic oligonucleotide
agcgagcggcgggatattgggttt

SEQ ID NO: 9146 - DNA, 21 bp, Artificial Sequence
  Description of Artificial Sequence: Synthetic oligonucleotide
ccgaaacgacgataaaaataa

SEQ ID NO: 9147 - DNA, 21 bp, Artificial Sequence
  Description of Artificial Sequence: Synthetic oligonucleotide
ccgaaaaacgaaaactccata

SEQ ID NO: 9148 - DNA, 21 bp, Artificial Sequence
  Description of Artificial Sequence: Synthetic oligonucleotide
cgtgagttgtagggaaacgta

SEQ ID NO: 9149 - DNA, 22 bp, Artificial Sequence
  Description of Artificial Sequence: Synthetic oligonucleotide
ctacgtttccctacaactcacg

SEQ ID NO: 9150 - DNA, 24 bp, Artificial Sequence
  Description of Artificial Sequence: Synthetic oligonucleotide
tttttcgatataggtttcgagttt

SEQ ID NO: 9151 - DNA, 22 bp, Artificial Sequence
  Description of Artificial Sequence: Synthetic oligonucleotide
aaataataaaacgctcacgacc

SEQ ID NO: 9152 - DNA, 21 bp, Artificial Sequence
  Description of Artificial Sequence: Synthetic oligonucleotide
caaacctaaattccgaaacga

SEQ ID NO: 9153 - DNA, 21 bp, Artificial Sequence
  Description of Artificial Sequence: Synthetic oligonucleotide
ttaatttttcgaggttttgcg

SEQ ID NO: 9154 - DNA, 22 bp, Artificial Sequence
  Description of Artificial Sequence: Synthetic oligonucleotide
aattccgaaacgacgataaaaa

SEQ ID NO: 9155 - DNA, 21 bp, Artificial Sequence
  Description of Artificial Sequence: Synthetic oligonucleotide
cgtttccctacaactcacgta

SEQ ID NO: 9156 - DNA, 21 bp, Artificial Sequence
  Description of Artificial Sequence: Synthetic oligonucleotide
tacgtttccctacaactcacg

SEQ ID NO: 9157 - DNA, 23 bp, Artificial Sequence
  Description of Artificial Sequence: Synthetic oligonucleotide
ttttcgatataggtttcgagttt

SEQ ID NO: 9158 - DNA, 21 bp, Artificial Sequence
  Description of Artificial Sequence: Synthetic oligonucleotide
cgggtttacgtgagttgtagg

SEQ ID NO: 9159 - DNA, 21 bp, Artificial Sequence
  Description of Artificial Sequence: Synthetic oligonucleotide
gagttaatcggcgtggagtat

SEQ ID NO: 9160 - DNA, 20 bp, Artificial Sequence
  Description of Artificial Sequence: Synthetic oligonucleotide
cgcaaaacctcgaaaaatta

SEQ ID NO: 9161 - DNA, 35 bp, Artificial Sequence
  Description of Artificial Sequence: Synthetic oligonucleotide
gggattttaggggtcgtgagcgttttattattttt

SEQ ID NO: 9162 - DNA, 19 bp, Artificial Sequence
  Description of Artificial Sequence: Synthetic oligonucleotide
aataaaacgctcacgaccc

SEQ ID NO: 9163 - DNA, 23 bp, Artificial Sequence
  Description of Artificial Sequence: Synthetic oligonucleotide
ttagtttttgagttaatcggcgt

SEQ ID NO: 9164 - DNA, 24 bp, Artificial Sequence
  Description of Artificial Sequence: Synthetic oligonucleotide
ttttcgatataggtttcgagtttt

SEQ ID NO: 9165 - DNA, 20 bp, Artificial Sequence
  Description of Artificial Sequence: Synthetic oligonucleotide
acgtgagttgtagggaaacg

SEQ ID NO: 9166 - DNA, 21 bp, Artificial Sequence
  Description of Artificial Sequence: Synthetic oligonucleotide
gaaaaacgaaaactccatacg

SEQ ID NO: 9167 - DNA, 23 bp, Artificial Sequence
  Description of Artificial Sequence: Synthetic oligonucleotide
tttcgatataggtttcgagtttt

SEQ ID NO: 9168 - DNA, 22 bp, Artificial Sequence
  Description of Artificial Sequence: Synthetic oligonucleotide
ggtcgtgagcgttttattattt

SEQ ID NO: 9169 - DNA, 19 bp, Artificial Sequence
  Description of Artificial Sequence: Synthetic oligonucleotide
ttaatcgaccgcaaaacct

SEQ ID NO: 9170 - DNA, 37 bp, Artificial Sequence
  Description of Artificial Sequence: Synthetic oligonucleotide
tttacgttaattacggtatagttttgtagggaagggt

SEQ ID NO: 9171 - DNA, 19 bp, Artificial Sequence
  Description of Artificial Sequence: Synthetic oligonucleotide
aatttttcgaggttttgcg

SEQ ID NO: 9172 - DNA, 20 bp, Artificial Sequence
  Description of Artificial Sequence: Synthetic oligonucleotide
aaaacgaaaactccatacgc

SEQ ID NO: 9173 - DNA, 21 bp, Artificial Sequence
  Description of Artificial Sequence: Synthetic oligonucleotide
ttcgggtttacgtgagttgta

SEQ ID NO: 9174 - DNA, 20 bp, Artificial Sequence
  Description of Artificial Sequence: Synthetic oligonucleotide
aaattccgaaacgacgataa

SEQ ID NO: 9175 - DNA, 19 bp, Artificial Sequence
  Description of Artificial Sequence: Synthetic oligonucleotide
gaaaactccatacgcgacc

SEQ ID NO: 9176 - DNA, 23 bp, Artificial Sequence
  Description of Artificial Sequence: Synthetic oligonucleotide
aaaataataaaacgctcacgacc

SEQ ID NO: 9177 - DNA, 22 bp, Artificial Sequence
  Description of Artificial Sequence: Synthetic oligonucleotide
gagttgttttgttcgtttacgc

SEQ ID NO: 9178 - DNA, 20 bp, Artificial Sequence
  Description of Artificial Sequence: Synthetic oligonucleotide
atcgcacgccatactactca

SEQ ID NO: 9179 - DNA, 36 bp, Artificial Sequence
  Description of Artificial Sequence: Synthetic oligonucleotide
gagtttagttcgatttattttcgtcggttgttacgt

SEQ ID NO: 9180 - DNA, 20 bp, Artificial Sequence
  Description of Artificial Sequence: Synthetic oligonucleotide
cgtggagtatcgtgaaggtc

SEQ ID NO: 9181 - DNA, 20 bp, Artificial Sequence
  Description of Artificial Sequence: Synthetic oligonucleotide
gtggagtatcgtgaaggtcg

SEQ ID NO: 9182 - DNA, 20 bp, Artificial Sequence
  Description of Artificial Sequence: Synthetic oligonucleotide
agtatcgtgaaggtcgaacg

SEQ ID NO: 9183 - DNA, 20 bp, Artificial Sequence
  Description of Artificial Sequence: Synthetic oligonucleotide
gtttttgagttaatcggcgt

SEQ ID NO: 9184 - DNA, 20 bp, Artificial Sequence
  Description of Artificial Sequence: Synthetic oligonucleotide
gcacgccatactactcaacg

SEQ ID NO: 9185 - DNA, 20 bp, Artificial Sequence
  Description of Artificial Sequence: Synthetic oligonucleotide
ggagtatcgtgaaggtcgaa

SEQ ID NO: 9186 - DNA, 19 bp, Artificial Sequence
  Description of Artificial Sequence: Synthetic oligonucleotide
cgcacgccatactactcaa

SEQ ID NO: 9187 - DNA, 19 bp, Artificial Sequence
  Description of Artificial Sequence: Synthetic oligonucleotide
gaggttttgcggtcgatta

SEQ ID NO: 9188 - DNA, 20 bp, Artificial Sequence
  Description of Artificial Sequence: Synthetic oligonucleotide
gttggtgttcgatttttcgt

SEQ ID NO: 9189 - DNA, 20 bp, Artificial Sequence
  Description of Artificial Sequence: Synthetic oligonucleotide
ttggtgttcgatttttcgtc

SEQ ID NO: 9190 - DNA, 23 bp, Artificial Sequence
  Description of Artificial Sequence: Synthetic oligonucleotide
aaaaataataaaacgctcacgac

SEQ ID NO: 9191 - DNA, 22 bp, Artificial Sequence
  Description of Artificial Sequence: Synthetic oligonucleotide
gggtcgtgagcgttttattatt

SEQ ID NO: 9192 - DNA, 22 bp, Artificial Sequence
  Description of Artificial Sequence: Synthetic oligonucleotide
tcgtagagttgttttgttcgtt

SEQ ID NO: 9193 - DNA, 22 bp, Artificial Sequence
  Description of Artificial Sequence: Synthetic oligonucleotide
tttcgggtttacgtgagttgta

SEQ ID NO: 9194 - DNA, 22 bp, Artificial Sequence
  Description of Artificial Sequence: Synthetic oligonucleotide
gtttttaggtgttgtcgtcgtt

SEQ ID NO: 9195 - DNA, 18 bp, Artificial Sequence
  Description of Artificial Sequence: Synthetic oligonucleotide
aaactccatacgcgaccc

SEQ ID NO: 9196 - DNA, 29 bp, Artificial Sequence
  Description of Artificial Sequence: Synthetic oligonucleotide
atcgtcgtttcggaatttaggtttggggg

SEQ ID NO: 9197 - DNA, 21 bp, Artificial Sequence
  Description of Artificial Sequence: Synthetic oligonucleotide
gagtatcgtgaaggtcgaacg

SEQ ID NO: 9198 - DNA, 21 bp, Artificial Sequence
  Description of Artificial Sequence: Synthetic oligonucleotide
gttcgatttttcgtcgttatt

SEQ ID NO: 9199 - DNA, 20 bp, Artificial Sequence
  Description of Artificial Sequence: Synthetic oligonucleotide
aacctaaattccgaaacgac

SEQ ID NO: 9200 - DNA, 21 bp, Artificial Sequence
  Description of Artificial Sequence: Synthetic oligonucleotide
tttttcgggtttacgtgagtt

SEQ ID NO: 9201 - DNA, 19 bp, Artificial Sequence
  Description of Artificial Sequence: Synthetic oligonucleotide
tcgcacgccatactactca

SEQ ID NO: 9202 - DNA, 21 bp, Artificial Sequence
  Description of Artificial Sequence: Synthetic oligonucleotide
ctacaactcacgtaaacccga

SEQ ID NO: 9203 - DNA, 21 bp, Artificial Sequence
  Description of Artificial Sequence: Synthetic oligonucleotide
tacaactcacgtaaacccgaa

SEQ ID NO: 9204 - DNA, 19 bp, Artificial Sequence
  Description of Artificial Sequence: Synthetic oligonucleotide
cgaaaactccatacgcgac

SEQ ID NO: 9205 - DNA, 19 bp, Artificial Sequence
  Description of Artificial Sequence: Synthetic oligonucleotide
acgaaaactccatacgcga

SEQ ID NO: 9206 - DNA, 22 bp, Artificial Sequence
  Description of Artificial Sequence: Synthetic oligonucleotide
tttttaggtgttgtcgtcgtta

SEQ ID NO: 9207 - DNA, 22 bp, Artificial Sequence
  Description of Artificial Sequence: Synthetic oligonucleotide
cgtagagttgttttgttcgttt

SEQ ID NO: 9208 - DNA, 24 bp, Artificial Sequence
  Description of Artificial Sequence: Synthetic oligonucleotide
gttagtttttgagttaatcggcgt

SEQ ID NO: 9209 - DNA, 22 bp, Artificial Sequence
  Description of Artificial Sequence: Synthetic oligonucleotide
aatcgtagagttgttttgttcg

SEQ ID NO: 9210 - DNA, 42 bp, Artificial Sequence
  Description of Artificial Sequence: Synthetic oligonucleotide
tacgcggagtttagttcgatttattttcgtcggttgttacgt

SEQ ID NO: 9211 - DNA, 17 bp, Artificial Sequence
  Description of Artificial Sequence: Synthetic oligonucleotide
aaacgtaggggcggttt

SEQ ID NO: 9212 - DNA, 22 bp, Artificial Sequence
  Description of Artificial Sequence: Synthetic oligonucleotide
attaacaactccgaaaaacgaa

SEQ ID NO: 9213 - DNA, 20 bp, Artificial Sequence
  Description of Artificial Sequence: Synthetic oligonucleotide
gggggcggtggggtcgcgta

SEQ ID NO: 9214 - DNA, 19 bp, Artificial Sequence
  Description of Artificial Sequence: Synthetic oligonucleotide
aaaactccatacgcgaccc

SEQ ID NO: 9215 - DNA, 22 bp, Artificial Sequence
  Description of Artificial Sequence: Synthetic oligonucleotide
aaaataataaaacgctcacgac

SEQ ID NO: 9216 - DNA, 23 bp, Artificial Sequence
  Description of Artificial Sequence: Synthetic oligonucleotide
atcgtagagttgttttgttcgtt

SEQ ID NO: 9217 - DNA, 20 bp, Artificial Sequence
  Description of Artificial Sequence: Synthetic oligonucleotide
taaattccgaaacgacgata

SEQ ID NO: 9218 - DNA, 21 bp, Artificial Sequence
  Description of Artificial Sequence: Synthetic oligonucleotide
agttgttttgttcgtttacgc

SEQ ID NO: 9219 - DNA, 22 bp, Artificial Sequence
  Description of Artificial Sequence: Synthetic oligonucleotide
tcgtgagcgttttattattttt

SEQ ID NO: 9220 - DNA, 20 bp, Artificial Sequence
  Description of Artificial Sequence: Synthetic oligonucleotide
tgttggtgttcgatttttcg

SEQ ID NO: 9221 - DNA, 22 bp, Artificial Sequence
  Description of Artificial Sequence: Synthetic oligonucleotide
cgttagtttttgagttaatcgg

SEQ ID NO: 9222 - DNA, 23 bp, Artificial Sequence
  Description of Artificial Sequence: Synthetic oligonucleotide
gtcgtgagcgttttattattttt

SEQ ID NO: 9223 - DNA, 21 bp, Artificial Sequence
  Description of Artificial Sequence: Synthetic oligonucleotide
gcgtatggagttttcgttttt

SEQ ID NO: 9224 - DNA, 19 bp, Artificial Sequence
  Description of Artificial Sequence: Synthetic oligonucleotide
aaccacatcctctacgcga

SEQ ID NO: 9225 - DNA, 31 bp, Artificial Sequence
  Description of Artificial Sequence: Synthetic oligonucleotide
agggtggagggtttagttcgtgattttacgt

SEQ ID NO: 9226 - DNA, 17 bp, Artificial Sequence
  Description of Artificial Sequence: Synthetic oligonucleotide
gaaacgtaggggcggtt

SEQ ID NO: 9227 - DNA, 18 bp, Artificial Sequence
  Description of Artificial Sequence: Synthetic oligonucleotide
accacatcctctacgcga

SEQ ID NO: 9228 - DNA, 22 bp, Artificial Sequence
  Description of Artificial Sequence: Synthetic oligonucleotide
tttaggtgttgtcgtcgttatc

SEQ ID NO: 9229 - DNA, 24 bp, Artificial Sequence
  Description of Artificial Sequence: Synthetic oligonucleotide
ttaatcgtagagttgttttgttcg

SEQ ID NO: 9230 - DNA, 19 bp, Artificial Sequence
  Description of Artificial Sequence: Synthetic oligonucleotide
ttttgagttaatcggcgtg

SEQ ID NO: 9231 - DNA, 20 bp, Artificial Sequence
  Description of Artificial Sequence: Synthetic oligonucleotide
agttaatcggcgtggagtat

SEQ ID NO: 9232 - DNA, 23 bp, Artificial Sequence
  Description of Artificial Sequence: Synthetic oligonucleotide
ttttaggtgttgtcgtcgttatc

SEQ ID NO: 9233 - DNA, 19 bp, Artificial Sequence
  Description of Artificial Sequence: Synthetic oligonucleotide
tggtgttcgatttttcgtc

SEQ ID NO: 9234 - DNA, 22 bp, Artificial Sequence
  Description of Artificial Sequence: Synthetic oligonucleotide
acgaacgacgaaacattaaact

SEQ ID NO: 9235 - DNA, 22 bp, Artificial Sequence
  Description of Artificial Sequence: Synthetic oligonucleotide
gcggcggtagtatttagaagtc

SEQ ID NO: 9236 - DNA, 33 bp, Artificial Sequence
  Description of Artificial Sequence: Synthetic oligonucleotide
ttgcgtttttttatagtttacgtgggttcgagg

SEQ ID NO: 9237 - DNA, 22 bp, Artificial Sequence
  Description of Artificial Sequence: Synthetic oligonucleotide
gaacgacgaaacattaaactcc

SEQ ID NO: 9238 - DNA, 22 bp, Artificial Sequence
  Description of Artificial Sequence: Synthetic oligonucleotide
acgacgaaacattaaactcctc

SEQ ID NO: 9239 - DNA, 23 bp, Artificial Sequence
  Description of Artificial Sequence: Synthetic oligonucleotide
ggcggtagtatttagaagtcgtt

SEQ ID NO: 9240 - DNA, 22 bp, Artificial Sequence
  Description of Artificial Sequence: Synthetic oligonucleotide
caccacgactaataaacctacg

SEQ ID NO: 9241 - DNA, 22 bp, Artificial Sequence
  Description of Artificial Sequence: Synthetic oligonucleotide
cgtggggaaaaatataagtacg

SEQ ID NO: 9242 - DNA, 34 bp, Artificial Sequence
  Description of Artificial Sequence: Synthetic oligonucleotide
agatcgatttattatataacgggagggggaggtt

SEQ ID NO: 9243 - DNA, 22 bp, Artificial Sequence
  Description of Artificial Sequence: Synthetic oligonucleotide
ctttaaccaatcaacgaacgac

SEQ ID NO: 9244 - DNA, 21 bp, Artificial Sequence
  Description of Artificial Sequence: Synthetic oligonucleotide
gcggcggtagtatttagaagt

SEQ ID NO: 9245 - DNA, 33 bp, Artificial Sequence
  Description of Artificial Sequence: Synthetic oligonucleotide
tttttatagtttacgtgggttcgaggaggagga

SEQ ID NO: 9246 - DNA, 22 bp, Artificial Sequence
  Description of Artificial Sequence: Synthetic oligonucleotide
cgaacgacgaaacattaaactc

SEQ ID NO: 9247 - DNA, 22 bp, Artificial Sequence
  Description of Artificial Sequence: Synthetic oligonucleotide
ggcggtagtatttagaagtcgt

SEQ ID NO: 9248 - DNA, 20 bp, Artificial Sequence
  Description of Artificial Sequence: Synthetic oligonucleotide
cgaaaccttacgaccgatta

SEQ ID NO: 9249 - DNA, 22 bp, Artificial Sequence
  Description of Artificial Sequence: Synthetic oligonucleotide
tttagaagtcgtttttgcgttt

SEQ ID NO: 9250 - DNA, 32 bp, Artificial Sequence
  Description of Artificial Sequence: Synthetic oligonucleotide
aggaggagtttaatgtttcgtcgttcgttgat

SEQ ID NO: 9251 - DNA, 22 bp, Artificial Sequence
  Description of Artificial Sequence: Synthetic oligonucleotide
ttagaagtcgtttttgcgtttt

SEQ ID NO: 9252 - DNA, 22 bp, Artificial Sequence
  Description of Artificial Sequence: Synthetic oligonucleotide
tatagtttacgtgggttcgagg

SEQ ID NO: 9253 - DNA, 22 bp, Artificial Sequence
  Description of Artificial Sequence: Synthetic oligonucleotide
cgactactacgcccatttctat

SEQ ID NO: 9254 - DNA, 20 bp, Artificial Sequence
  Description of Artificial Sequence: Synthetic oligonucleotide
cggacgagggatttttagat

SEQ ID NO: 9255 - DNA, 30 bp, Artificial Sequence
  Description of Artificial Sequence: Synthetic oligonucleotide
ggcggtgtcgtacgttatgttgtttagcgg

SEQ ID NO: 9256 - DNA, 21 bp, Artificial Sequence
  Description of Artificial Sequence: Synthetic oligonucleotide
tttaaccaatcaacgaacgac

SEQ ID NO: 9257 - DNA, 24 bp, Artificial Sequence
  Description of Artificial Sequence: Synthetic oligonucleotide
tccgctatattctaaattcgtctt

SEQ ID NO: 9258 - DNA, 22 bp, Artificial Sequence
  Description of Artificial Sequence: Synthetic oligonucleotide
atagaaatgggcgtagtagtcg

SEQ ID NO: 9259 - DNA, 25 bp, Artificial Sequence
  Description of Artificial Sequence: Synthetic oligonucleotide
gtcggattgggtttcgcgtaggcgg

SEQ ID NO: 9260 - DNA, 21 bp, Artificial Sequence
  Description of Artificial Sequence: Synthetic oligonucleotide
cgaaactccaaaaaccgtaaa

SEQ ID NO: 9261 - DNA, 22 bp, Artificial Sequence
  Description of Artificial Sequence: Synthetic oligonucleotide
gtcgttcgttgattggttaaag

SEQ ID NO: 9262 - DNA, 27 bp, Artificial Sequence
  Description of Artificial Sequence: Synthetic oligonucleotide
agttgtgtcgtgattggcgtaagggga

SEQ ID NO: 9263 - DNA, 21 bp, Artificial Sequence
  Description of Artificial Sequence: Synthetic oligonucleotide
ctcgaaactccaaaaaccgta

SEQ ID NO: 9264 - DNA, 20 bp, Artificial Sequence
  Description of Artificial Sequence: Synthetic oligonucleotide
tcgaaactccaaaaaccgta

SEQ ID NO: 9265 - DNA, 22 bp, Artificial Sequence
  Description of Artificial Sequence: Synthetic oligonucleotide
atttagaagtcgtttttgcgtt

SEQ ID NO: 9266 - DNA, 20 bp, Artificial Sequence
  Description of Artificial Sequence: Synthetic oligonucleotide
cgtaaaactaccctacccgc

SEQ ID NO: 9267 - DNA, 22 bp, Artificial Sequence
  Description of Artificial Sequence: Synthetic oligonucleotide
cgttatgttgtttagcggaagt

SEQ ID NO: 9268 - DNA, 31 bp, Artificial Sequence
  Description of Artificial Sequence: Synthetic oligonucleotide
ggcgtagtagtcggcgggagtgggtcggatt

SEQ ID NO: 9269 - DNA, 23 bp, Artificial Sequence
  Description of Artificial Sequence: Synthetic oligonucleotide
aacgacgaaacattaaactcctc

SEQ ID NO: 9270 - DNA, 22 bp, Artificial Sequence
  Description of Artificial Sequence: Synthetic oligonucleotide
tacgttatgttgtttagcggaa

SEQ ID NO: 9271 - DNA, 23 bp, Artificial Sequence
  Description of Artificial Sequence: Synthetic oligonucleotide
ccaccacgactaataaacctacg

SEQ ID NO: 9272 - DNA, 35 bp, Artificial Sequence
  Description of Artificial Sequence: Synthetic oligonucleotide
atcgatttattatataacgggagggggaggttagg

SEQ ID NO: 9273 - DNA, 24 bp, Artificial Sequence
  Description of Artificial Sequence: Synthetic oligonucleotide
gcggtagtatttagaagtcgtttt

SEQ ID NO: 9274 - DNA, 19 bp, Artificial Sequence
  Description of Artificial Sequence: Synthetic oligonucleotide
ggcggcggtagtatttaga

SEQ ID NO: 9275 - DNA, 21 bp, Artificial Sequence
  Description of Artificial Sequence: Synthetic oligonucleotide
ggcggtagtatttagaagtcg

SEQ ID NO: 9276 - DNA, 21 bp, Artificial Sequence
  Description of Artificial Sequence: Synthetic oligonucleotide
cggcggtagtatttagaagtc

SEQ ID NO: 9277 - DNA, 21 bp, Artificial Sequence
  Description of Artificial Sequence: Synthetic oligonucleotide
tcgttcgttgattggttaaag

SEQ ID NO: 9278 - DNA, 21 bp, Artificial Sequence
  Description of Artificial Sequence: Synthetic oligonucleotide
atagtttacgtgggttcgagg

SEQ ID NO: 9279 - DNA, 23 bp, Artificial Sequence
  Description of Artificial Sequence: Synthetic oligonucleotide
ccgctatattctaaattcgtctt

SEQ ID NO: 9280 - DNA, 20 bp, Artificial Sequence
  Description of Artificial Sequence: Synthetic oligonucleotide
atcaacgaacgacgaaacat

SEQ ID NO: 9281 - DNA, 21 bp, Artificial Sequence
  Description of Artificial Sequence: Synthetic oligonucleotide
cgacgaaacattaaactcctc

SEQ ID NO: 9282 - DNA, 20 bp, Artificial Sequence
  Description of Artificial Sequence: Synthetic oligonucleotide
aacgctttaaccaatcaacg

SEQ ID NO: 9283 - DNA, 19 bp, Artificial Sequence
  Description of Artificial Sequence: Synthetic oligonucleotide
cttacgccaatcacgacac

SEQ ID NO: 9284 - DNA, 20 bp, Artificial Sequence
  Description of Artificial Sequence: Synthetic oligonucleotide
acgctttaaccaatcaacga

SEQ ID NO: 9285 - DNA, 23 bp, Artificial Sequence
  Description of Artificial Sequence: Synthetic oligonucleotide
tatagaaatgggcgtagtagtcg

SEQ ID NO: 9286 - DNA, 23 bp, Artificial Sequence
  Description of Artificial Sequence: Synthetic oligonucleotide
tttatagtttacgtgggttcgag

SEQ ID NO: 9287 - DNA, 20 bp, Artificial Sequence
  Description of Artificial Sequence: Synthetic oligonucleotide
gtggcggcggtagtatttag

SEQ ID NO: 9288 - DNA, 23 bp, Artificial Sequence
  Description of Artificial Sequence: Synthetic oligonucleotide
tttttatagtttacgtgggttcg

SEQ ID NO: 9289 - DNA, 20 bp, Artificial Sequence
  Description of Artificial Sequence: Synthetic oligonucleotide
gcggcggtagtatttagaag

SEQ ID NO: 9290 - DNA, 21 bp, Artificial Sequence
  Description of Artificial Sequence: Synthetic oligonucleotide
aatcaacgaacgacgaaacat

SEQ ID NO: 9291 - DNA, 23 bp, Artificial Sequence
  Description of Artificial Sequence: Synthetic oligonucleotide
tatttagaagtcgtttttgcgtt

SEQ ID NO: 9292 - DNA, 21 bp, Artificial Sequence
  Description of Artificial Sequence: Synthetic oligonucleotide
cgttattcgggatatttaggg

SEQ ID NO: 9293 - DNA, 22 bp, Artificial Sequence
  Description of Artificial Sequence: Synthetic oligonucleotide
tccgtttttatttaacctcgaa

SEQ ID NO: 9294 - DNA, 27 bp, Artificial Sequence
  Description of Artificial Sequence: Synthetic oligonucleotide
aggttttgggcggtttttacgcgagat

SEQ ID NO: 9295 - DNA, 22 bp, Artificial Sequence
  Description of Artificial Sequence: Synthetic oligonucleotide
cgttattcgggatatttagggt

SEQ ID NO: 9296 - DNA, 22 bp, Artificial Sequence
  Description of Artificial Sequence: Synthetic oligonucleotide
actccgtttttatttaacctcg

SEQ ID NO: 9297 - DNA, 22 bp, Artificial Sequence
  Description of Artificial Sequence: Synthetic oligonucleotide
tagtcgcgtagtgtatgcgtag

SEQ ID NO: 9298 - DNA, 22 bp, Artificial Sequence
  Description of Artificial Sequence: Synthetic oligonucleotide
atataaacatccgtcccaaacg

SEQ ID NO: 9299 - DNA, 34 bp, Artificial Sequence
  Description of Artificial Sequence: Synthetic oligonucleotide
tgtgtttagagaagttttgacgtcgttttggaag

SEQ ID NO: 9300 - DNA, 22 bp, Artificial Sequence
  Description of Artificial Sequence: Synthetic oligonucleotide
gcgtagtgtatgcgtagaaggt

SEQ ID NO: 9301 - DNA, 23 bp, Artificial Sequence
  Description of Artificial Sequence: Synthetic oligonucleotide
cactccgtttttatttaacctcg

SEQ ID NO: 9302 - DNA, 21 bp, Artificial Sequence
  Description of Artificial Sequence: Synthetic oligonucleotide
gcgttattcgggatatttagg

SEQ ID NO: 9303 - DNA, 21 bp, Artificial Sequence
  Description of Artificial Sequence: Synthetic oligonucleotide
ggcgttattcgggatatttag

SEQ ID NO: 9304 - DNA, 21 bp, Artificial Sequence
  Description of Artificial Sequence: Synthetic oligonucleotide
gttgtagtcgttcgagtcggt

SEQ ID NO: 9305 - DNA, 22 bp, Artificial Sequence
  Description of Artificial Sequence: Synthetic oligonucleotide
accctaaatatcccgaataacg

SEQ ID NO: 9306 - DNA, 25 bp, Artificial Sequence
  Description of Artificial Sequence: Synthetic oligonucleotide
ggcgcggagggtacggagattacgg

SEQ ID NO: 9307 - DNA, 20 bp, Artificial Sequence
  Description of Artificial Sequence: Synthetic oligonucleotide
tgtagtcgttcgagtcggtt

SEQ ID NO: 9308 - DNA, 20 bp, Artificial Sequence
  Description of Artificial Sequence: Synthetic oligonucleotide
ttgtagtcgttcgagtcggt

SEQ ID NO: 9309 - DNA, 21 bp, Artificial Sequence
  Description of Artificial Sequence: Synthetic oligonucleotide
tataaacatccgtcccaaacg

SEQ ID NO: 9310 - DNA, 20 bp, Artificial Sequence
  Description of Artificial Sequence: Synthetic oligonucleotide
gtagtcgttcgagtcggttc

SEQ ID NO: 9311 - DNA, 21 bp, Artificial Sequence
  Description of Artificial Sequence: Synthetic oligonucleotide
agtcgcgtagtgtatgcgtag

SEQ ID NO: 9312 - DNA, 23 bp, Artificial Sequence
  Description of Artificial Sequence: Synthetic oligonucleotide
ctccgtttttatttaacctcgaa

SEQ ID NO: 9313 - DNA, 21 bp, Artificial Sequence
  Description of Artificial Sequence: Synthetic oligonucleotide
cgcgaggatgttgatttagag

SEQ ID NO: 9314 - DNA, 22 bp, Artificial Sequence
  Description of Artificial Sequence: Synthetic oligonucleotide
aaaaattaaaacgcgaaccttt

SEQ ID NO: 9315 - DNA, 26 bp, Artificial Sequence
  Description of Artificial Sequence: Synthetic oligonucleotide
aggcgtttgggttttttcggtgtcgg

SEQ ID NO: 9316 - DNA, 21 bp, Artificial Sequence
  Description of Artificial Sequence: Synthetic oligonucleotide
ctaaatatcccgaataacgcc

SEQ ID NO: 9317 - DNA, 21 bp, Artificial Sequence
  Description of Artificial Sequence: Synthetic oligonucleotide
cctaaatatcccgaataacgc

SEQ ID NO: 9318 - DNA, 22 bp, Artificial Sequence
  Description of Artificial Sequence: Synthetic oligonucleotide
taaaaattaaaacgcgaacctt

SEQ ID NO: 9319 - DNA, 20 bp, Artificial Sequence
  Description of Artificial Sequence: Synthetic oligonucleotide
cgcgaggatgttgatttaga

SEQ ID NO: 9320 - DNA, 22 bp, Artificial Sequence
  Description of Artificial Sequence: Synthetic oligonucleotide
aaaattaaaacgcgaaccttta

SEQ ID NO: 9321 - DNA, 21 bp, Artificial Sequence
  Description of Artificial Sequence: Synthetic oligonucleotide
cgcgtagtgtatgcgtagaag

SEQ ID NO: 9322 - DNA, 21 bp, Artificial Sequence
  Description of Artificial Sequence: Synthetic oligonucleotide
ccctaaatatcccgaataacg

SEQ ID NO: 9323 - DNA, 22 bp, Artificial Sequence
  Description of Artificial Sequence: Synthetic oligonucleotide
tgcgtagaaggtttagatacga

SEQ ID NO: 9324 - DNA, 20 bp, Artificial Sequence
  Description of Artificial Sequence: Synthetic oligonucleotide
ggaggttgtagtcgttcgag

SEQ ID NO: 9325 - DNA, 20 bp, Artificial Sequence
  Description of Artificial Sequence: Synthetic oligonucleotide
ataaacatccgtcccaaacg

SEQ ID NO: 9326 - DNA, 22 bp, Artificial Sequence
  Description of Artificial Sequence: Synthetic oligonucleotide
ctaaaaattaaaacgcgaacct

SEQ ID NO: 9327 - DNA, 22 bp, Artificial Sequence
  Description of Artificial Sequence: Synthetic oligonucleotide
cctaaaaattaaaacgcgaacc

SEQ ID NO: 9328 - DNA, 22 bp, Artificial Sequence
  Description of Artificial Sequence: Synthetic oligonucleotide
cgatagtggtttttcggtttag

SEQ ID NO: 9329 - DNA, 19 bp, Artificial Sequence
  Description of Artificial Sequence: Synthetic oligonucleotide
cgtaatctccgtaccctcc

SEQ ID NO: 9330 - DNA, 21 bp, Artificial Sequence
  Description of Artificial Sequence: Synthetic oligonucleotide
agtcggttcgggtgggggcgg

SEQ ID NO: 9331 - DNA, 19 bp, Artificial Sequence
  Description of Artificial Sequence: Synthetic oligonucleotide
ccgtaatctccgtaccctc

SEQ ID NO: 9332 - DNA, 19 bp, Artificial Sequence
  Description of Artificial Sequence: Synthetic oligonucleotide
gtaatctccgtaccctccg

SEQ ID NO: 9333 - DNA, 19 bp, Artificial Sequence
  Description of Artificial Sequence: Synthetic oligonucleotide
ggagggtacggagattacg

SEQ ID NO: 9334 - DNA, 20 bp, Artificial Sequence
  Description of Artificial Sequence: Synthetic oligonucleotide
ttggaggttgtagtcgttcg

SEQ ID NO: 9335 - DNA, 22 bp, Artificial Sequence
  Description of Artificial Sequence: Synthetic oligonucleotide
acctaaaaattaaaacgcgaac

SEQ ID NO: 9336 - DNA, 19 bp, Artificial Sequence
  Description of Artificial Sequence: Synthetic oligonucleotide
gccgtaatctccgtaccct

SEQ ID NO: 9337 - DNA, 19 bp, Artificial Sequence
  Description of Artificial Sequence: Synthetic oligonucleotide
agggtacggagattacggc

SEQ ID NO: 9338 - DNA, 18 bp, Artificial Sequence
  Description of Artificial Sequence: Synthetic oligonucleotide
gggtacggagattacggc

SEQ ID NO: 9339 - DNA, 20 bp, Artificial Sequence
  Description of Artificial Sequence: Synthetic oligonucleotide
gtcgtagttcggagttttgg

SEQ ID NO: 9340 - DNA, 23 bp, Artificial Sequence
  Description of Artificial Sequence: Synthetic oligonucleotide
tcgcgctatacctctaataaaaa

SEQ ID NO: 9341 - DNA, 37 bp, Artificial Sequence
  Description of Artificial Sequence: Synthetic oligonucleotide
ttcgtttgtgtacgttatttgttgtggggtggtcgaa

SEQ ID NO: 9342 - DNA, 20 bp, Artificial Sequence
  Description of Artificial Sequence: Synthetic oligonucleotide
tcgggatatttagggtttcg

SEQ ID NO: 9343 - DNA, 40 bp, Artificial Sequence
  Description of Artificial Sequence: Synthetic oligonucleotide
ggtttttacgcgagatcgtaaattatgataataggtagtt

SEQ ID NO: 9344 - DNA, 23 bp, Artificial Sequence
  Description of Artificial Sequence: Synthetic oligonucleotide
tcgtttgtgtacgttatttgttg

SEQ ID NO: 9345 - DNA, 19 bp, Artificial Sequence
  Description of Artificial Sequence: Synthetic oligonucleotide
atatctatcccaaccgcga

SEQ ID NO: 9346 - DNA, 41 bp, Artificial Sequence
  Description of Artificial Sequence: Synthetic oligonucleotide
gatattggaaggaacgagaataaatatttaattacggacgt

SEQ ID NO: 9347 - DNA, 21 bp, Artificial Sequence
  Description of Artificial Sequence: Synthetic oligonucleotide
ccgtttttatttaacctcgaa

SEQ ID NO: 9348 - DNA, 23 bp, Artificial Sequence
  Description of Artificial Sequence: Synthetic oligonucleotide
aattttatgtagtcgcgtagtgt

SEQ ID NO: 9349 - DNA, 22 bp, Artificial Sequence
  Description of Artificial Sequence: Synthetic oligonucleotide
acaacgacttacttccaaaacg

SEQ ID NO: 9350 - DNA, 41 bp, Artificial Sequence
  Description of Artificial Sequence: Synthetic oligonucleotide
tgcgtagaaggtttagatacgaaatgttattttagtaatgt

SEQ ID NO: 9351 - DNA, 19 bp, Artificial Sequence
  Description of Artificial Sequence: Synthetic oligonucleotide
tagatggtttaggcgcgag

SEQ ID NO: 9352 - DNA, 23 bp, Artificial Sequence
  Description of Artificial Sequence: Synthetic oligonucleotide
atgcgtagaaggtttagatacga

SEQ ID NO: 9353 - DNA, 21 bp, Artificial Sequence
  Description of Artificial Sequence: Synthetic oligonucleotide
ctccgtttttatttaacctcg

SEQ ID NO: 9354 - DNA, 21 bp, Artificial Sequence
  Description of Artificial Sequence: Synthetic oligonucleotide
tcgcgtagtgtatgcgtagaa

SEQ ID NO: 9355 - DNA, 22 bp, Artificial Sequence
  Description of Artificial Sequence: Synthetic oligonucleotide
tcgatagtggtttttcggttta

SEQ ID NO: 9356 - DNA, 19 bp, Artificial Sequence
  Description of Artificial Sequence: Synthetic oligonucleotide
taaacatccgtcccaaacg

SEQ ID NO: 9357 - DNA, 22 bp, Artificial Sequence
  Description of Artificial Sequence: Synthetic oligonucleotide
gcggtttttatttgtatttcgt

SEQ ID NO: 9358 - DNA, 19 bp, Artificial Sequence
  Description of Artificial Sequence: Synthetic oligonucleotide
ctcgcgcctaaaccatcta

SEQ ID NO: 9359 - DNA, 24 bp, Artificial Sequence
  Description of Artificial Sequence: Synthetic oligonucleotide
tggtagaggcgcgagtatcggggt

SEQ ID NO: 9360 - DNA, 18 bp, Artificial Sequence
  Description of Artificial Sequence: Synthetic oligonucleotide
aaaagtcggggagtgacg

SEQ ID NO: 9361 - DNA, 22 bp, Artificial Sequence
  Description of Artificial Sequence: Synthetic oligonucleotide
aaactccgaactacgacaaaaa

SEQ ID NO: 9362 - DNA, 18 bp, Artificial Sequence
  Description of Artificial Sequence: Synthetic oligonucleotide
tgcggcggttgggcgcgt

SEQ ID NO: 9363 - DNA, 22 bp, Artificial Sequence
  Description of Artificial Sequence: Synthetic oligonucleotide
aaaactccgaactacgacaaaa

SEQ ID NO: 9364 - DNA, 18 bp, Artificial Sequence
  Description of Artificial Sequence: Synthetic oligonucleotide
tcgcgcctaaaccatcta

SEQ ID NO: 9365 - DNA, 20 bp, Artificial Sequence
  Description of Artificial Sequence: Synthetic oligonucleotide
tacgatctcgcgtaaaaacc

SEQ ID NO: 9366 - DNA, 32 bp, Artificial Sequence
  Description of Artificial Sequence: Synthetic oligonucleotide
ggcggcgttattcgggatatttagggtttcga

SEQ ID NO: 9367 - DNA, 22 bp, Artificial Sequence
  Description of Artificial Sequence: Synthetic oligonucleotide
cgatattggaaggaacgagaat

SEQ ID NO: 9368 - DNA, 19 bp, Artificial Sequence
  Description of Artificial Sequence: Synthetic oligonucleotide
ccgaaaaccctaaaacgaa

SEQ ID NO: 9369 - DNA, 30 bp, Artificial Sequence
  Description of Artificial Sequence: Synthetic oligonucleotide
tgggatagatatttcgggaattcgaggcgg

SEQ ID NO: 9370 - DNA, 22 bp, Artificial Sequence
  Description of Artificial Sequence: Synthetic oligonucleotide
tacctaaaaattaaaacgcgaa

SEQ ID NO: 9371 - DNA, 23 bp, Artificial Sequence
  Description of Artificial Sequence: Synthetic oligonucleotide
cgagagagttttaggtaatttcg

SEQ ID NO: 9372 - DNA, 20 bp, Artificial Sequence
  Description of Artificial Sequence: Synthetic oligonucleotide
aaccgactcgaacgactaca

SEQ ID NO: 9373 - DNA, 27 bp, Artificial Sequence
  Description of Artificial Sequence: Synthetic oligonucleotide
ttttcggtttagggaggagagcgcggt

SEQ ID NO: 9374 - DNA, 19 bp, Artificial Sequence
  Description of Artificial Sequence: Synthetic oligonucleotide
ttagatggtttaggcgcga

SEQ ID NO: 9375 - DNA, 23 bp, Artificial Sequence
  Description of Artificial Sequence: Synthetic oligonucleotide
aaccctaaatatcccgaataacg

SEQ ID NO: 9376 - DNA, 22 bp, Artificial Sequence
  Description of Artificial Sequence: Synthetic oligonucleotide
cgcgctatacctctaataaaaa

SEQ ID NO: 9377 - DNA, 20 bp, Artificial Sequence
  Description of Artificial Sequence: Synthetic oligonucleotide
gtcgcgtagtgtatgcgtag

SEQ ID NO: 9378 - DNA, 21 bp, Artificial Sequence
  Description of Artificial Sequence: Synthetic oligonucleotide
ttacgatctcgcgtaaaaacc

SEQ ID NO: 9379 - DNA, 22 bp, Artificial Sequence
  Description of Artificial Sequence: Synthetic oligonucleotide
ccctacgcaaatacgaaactac

SEQ ID NO: 9380 - DNA, 22 bp, Artificial Sequence
  Description of Artificial Sequence: Synthetic oligonucleotide
ggtagcgataattttacgtgga

SEQ ID NO: 9381 - DNA, 23 bp, Artificial Sequence
  Description of Artificial Sequence: Synthetic oligonucleotide
aagtcgggaacggtcggagcgtg

SEQ ID NO: 9382 - DNA, 22 bp, Artificial Sequence
  Description of Artificial Sequence: Synthetic oligonucleotide
gcgataattttacgtggatagg

SEQ ID NO: 9383 - DNA, 22 bp, Artificial Sequence
  Description of Artificial Sequence: Synthetic oligonucleotide
cctacgcaaatacgaaactacc

SEQ ID NO: 9384 - DNA, 22 bp, Artificial Sequence
  Description of Artificial Sequence: Synthetic oligonucleotide
aaatacgaaactaccgacaacg

SEQ ID NO: 9385 - DNA, 22 bp, Artificial Sequence
  Description of Artificial Sequence: Synthetic oligonucleotide
gccgaacgctaaatactaaaaa

SEQ ID NO: 9386 - DNA, 22 bp, Artificial Sequence
  Description of Artificial Sequence: Synthetic oligonucleotide
tagggtagagagtatcgttgcg

SEQ ID NO: 9387 - DNA, 30 bp, Artificial Sequence
  Description of Artificial Sequence: Synthetic oligonucleotide
ggggacgtaggcgtttacgtatcgtttagt

SEQ ID NO: 9388 - DNA, 22 bp, Artificial Sequence
  Description of Artificial Sequence: Synthetic oligonucleotide
tccctacgcaaatacgaaacta

SEQ ID NO: 9389 - DNA, 22 bp, Artificial Sequence
  Description of Artificial Sequence: Synthetic oligonucleotide
ctacgcaaatacgaaactaccg

SEQ ID NO: 9390 - DNA, 22 bp, Artificial Sequence
  Description of Artificial Sequence: Synthetic oligonucleotide
aatccaaacgcgaaaatactaa

SEQ ID NO: 9391 - DNA, 22 bp, Artificial Sequence
  Description of Artificial Sequence: Synthetic oligonucleotide
taaagtgggatcgtcgtagttg

SEQ ID NO: 9392 - DNA, 39 bp, Artificial Sequence
  Description of Artificial Sequence: Synthetic oligonucleotide
gtttggagattagaacgcgagtttttaaagtatatacgt

SEQ ID NO: 9393 - DNA, 21 bp, Artificial Sequence
  Description of Artificial Sequence: Synthetic oligonucleotide
tacgcaaatacgaaactaccg

SEQ ID NO: 9394 - DNA, 22 bp, Artificial Sequence
  Description of Artificial Sequence: Synthetic oligonucleotide
taaactttcccgataccgaata

SEQ ID NO: 9395 - DNA, 23 bp, Artificial Sequence
  Description of Artificial Sequence: Synthetic oligonucleotide
aattattaaagtgggatcgtcgt

SEQ ID NO: 9396 - DNA, 36 bp, Artificial Sequence
  Description of Artificial Sequence: Synthetic oligonucleotide
aagttcgattagtgtttggagattagaacgcgagtt

SEQ ID NO: 9397 - DNA, 22 bp, Artificial Sequence
  Description of Artificial Sequence: Synthetic oligonucleotide
aggtagcgataattttacgtgg

SEQ ID NO: 9398 - DNA, 21 bp, Artificial Sequence
  Description of Artificial Sequence: Synthetic oligonucleotide
gcaaatacgaaactaccgaca

SEQ ID NO: 9399 - DNA, 22 bp, Artificial Sequence
  Description of Artificial Sequence: Synthetic oligonucleotide
attaaagtgggatcgtcgtagt

SEQ ID NO: 9400 - DNA, 22 bp, Artificial Sequence
  Description of Artificial Sequence: Synthetic oligonucleotide
attattaaagtgggatcgtcgt

SEQ ID NO: 9401 - DNA, 22 bp, Artificial Sequence
  Description of Artificial Sequence: Synthetic oligonucleotide
aaactttcccgataccgaatac

SEQ ID NO: 9402 - DNA, 22 bp, Artificial Sequence
  Description of Artificial Sequence: Synthetic oligonucleotide
acgacgaaataaataacccctt

SEQ ID NO: 9403 - DNA, 23 bp, Artificial Sequence
  Description of Artificial Sequence: Synthetic oligonucleotide
ttagttgcgcgtttttagtattt

SEQ ID NO: 9404 - DNA, 25 bp, Artificial Sequence
  Description of Artificial Sequence: Synthetic oligonucleotide
ggcgttttcggcggagtttcgcgta

SEQ ID NO: 9405 - DNA, 22 bp, Artificial Sequence
  Description of Artificial Sequence: Synthetic oligonucleotide
gggatcgtcgtagttgaaaagt

SEQ ID NO: 9406 - DNA, 22 bp, Artificial Sequence
  Description of Artificial Sequence: Synthetic oligonucleotide
cgcgaaaatactaacccaaaat

SEQ ID NO: 9407 - DNA, 22 bp, Artificial Sequence
  Description of Artificial Sequence: Synthetic oligonucleotide
ttaaagtgggatcgtcgtagtt

SEQ ID NO: 9408 - DNA, 22 bp, Artificial Sequence
  Description of Artificial Sequence: Synthetic oligonucleotide
atccaaacgcgaaaatactaac

SEQ ID NO: 9409 - DNA, 22 bp, Artificial Sequence
  Description of Artificial Sequence: Synthetic oligonucleotide
aaataatccaaacgcgaaaata

SEQ ID NO: 9410 - DNA, 22 bp, Artificial Sequence
  Description of Artificial Sequence: Synthetic oligonucleotide
taaataatccaaacgcgaaaat

SEQ ID NO: 9411 - DNA, 21 bp, Artificial Sequence
  Description of Artificial Sequence: Synthetic oligonucleotide
agggtagagagtatcgttgcg

SEQ ID NO: 9412 - DNA, 23 bp, Artificial Sequence
  Description of Artificial Sequence: Synthetic oligonucleotide
agcgataattttacgtggatagg

SEQ ID NO: 9413 - DNA, 22 bp, Artificial Sequence
  Description of Artificial Sequence: Synthetic oligonucleotide
caaatacgaaactaccgacaac

SEQ ID NO: 9414 - DNA, 22 bp, Artificial Sequence
  Description of Artificial Sequence: Synthetic oligonucleotide
ttattaaagtgggatcgtcgta

SEQ ID NO: 9415 - DNA, 21 bp, Artificial Sequence
  Description of Artificial Sequence: Synthetic oligonucleotide
caaacgcgaaaatactaaccc

SEQ ID NO: 9416 - DNA, 21 bp, Artificial Sequence
  Description of Artificial Sequence: Synthetic oligonucleotide
ccaaacgcgaaaatactaacc

SEQ ID NO: 9417 - DNA, 21 bp, Artificial Sequence
  Description of Artificial Sequence: Synthetic oligonucleotide
acgcgaaaatactaacccaaa

SEQ ID NO: 9418 - DNA, 21 bp, Artificial Sequence
  Description of Artificial Sequence: Synthetic oligonucleotide
aacgcgaaaatactaacccaa

SEQ ID NO: 9419 - DNA, 21 bp, Artificial Sequence
  Description of Artificial Sequence: Synthetic oligonucleotide
aaacgcgaaaatactaaccca

SEQ ID NO: 9420 - DNA, 22 bp, Artificial Sequence
  Description of Artificial Sequence: Synthetic oligonucleotide
tagttgcgcgtttttagtattt

SEQ ID NO: 9421 - DNA, 22 bp, Artificial Sequence
  Description of Artificial Sequence: Synthetic oligonucleotide
ctaaataatccaaacgcgaaaa

SEQ ID NO: 9422 - DNA, 22 bp, Artificial Sequence
  Description of Artificial Sequence: Synthetic oligonucleotide
ctccctacgcaaatacgaaact

SEQ ID NO: 9423 - DNA, 23 bp, Artificial Sequence
  Description of Artificial Sequence: Synthetic oligonucleotide
ttattaaagtgggatcgtcgtag

SEQ ID NO: 9424 - DNA, 22 bp, Artificial Sequence
  Description of Artificial Sequence: Synthetic oligonucleotide
cgataattttacgtggatagga

SEQ ID NO: 9425 - DNA, 23 bp, Artificial Sequence
  Description of Artificial Sequence: Synthetic oligonucleotide
taatccaaacgcgaaaatactaa

SEQ ID NO: 9426 - DNA, 21 bp, Artificial Sequence
  Description of Artificial Sequence: Synthetic oligonucleotide
gggatcgtcgtagttgaaaag

SEQ ID NO: 9427 - DNA, 37 bp, Artificial Sequence
  Description of Artificial Sequence: Synthetic oligonucleotide
attagtgtttggagattagaacgcgagtttttaaagt

SEQ ID NO: 9428 - DNA, 22 bp, Artificial Sequence
  Description of Artificial Sequence: Synthetic oligonucleotide
tattaaagtgggatcgtcgtag

SEQ ID NO: 9429 - DNA, 22 bp, Artificial Sequence
  Description of Artificial Sequence: Synthetic oligonucleotide
aataatccaaacgcgaaaatac

SEQ ID NO: 9430 - DNA, 21 bp, Artificial Sequence
  Description of Artificial Sequence: Synthetic oligonucleotide
aaagtgggatcgtcgtagttg

SEQ ID NO: 9431 - DNA, 23 bp, Artificial Sequence
  Description of Artificial Sequence: Synthetic oligonucleotide
aggtagcgataattttacgtgga

SEQ ID NO: 9432 - DNA, 20 bp, Artificial Sequence
  Description of Artificial Sequence: Synthetic oligonucleotide
agtgggatcgtcgtagttga

SEQ ID NO: 9433 - DNA, 21 bp, Artificial Sequence
  Description of Artificial Sequence: Synthetic oligonucleotide
ctaaactttcccgataccgaa

SEQ ID NO: 9434 - DNA, 21 bp, Artificial Sequence
  Description of Artificial Sequence: Synthetic oligonucleotide
aatacgaaactaccgacaacg

SEQ ID NO: 9435 - DNA, 20 bp, Artificial Sequence
  Description of Artificial Sequence: Synthetic oligonucleotide
acgcaaatacgaaactaccg

SEQ ID NO: 9436 - DNA, 22 bp, Artificial Sequence
  Description of Artificial Sequence: Synthetic oligonucleotide
cgaacgctaaatactaaaaacg

SEQ ID NO: 9437 - DNA, 21 bp, Artificial Sequence
  Description of Artificial Sequence: Synthetic oligonucleotide
atacgaaactaccgacaacgc

SEQ ID NO: 9438 - DNA, 20 bp, Artificial Sequence
  Description of Artificial Sequence: Synthetic oligonucleotide
aagtgggatcgtcgtagttg

SEQ ID NO: 9439 - DNA, 22 bp, Artificial Sequence
  Description of Artificial Sequence: Synthetic oligonucleotide
cgacgaaataaataaccccttc

SEQ ID NO: 9440 - DNA, 21 bp, Artificial Sequence
  Description of Artificial Sequence: Synthetic oligonucleotide
aaactttcccgataccgaata

SEQ ID NO: 9441 - DNA, 23 bp, Artificial Sequence
  Description of Artificial Sequence: Synthetic oligonucleotide
aaggtagcgataattttacgtgg

SEQ ID NO: 9442 - DNA, 36 bp, Artificial Sequence
  Description of Artificial Sequence: Synthetic oligonucleotide
gttcgattagtgtttggagattagaacgcgagtttt

SEQ ID NO: 9443 - DNA, 20 bp, Artificial Sequence
  Description of Artificial Sequence: Synthetic oligonucleotide
gggatcgtcgtagttgaaaa

SEQ ID NO: 9444 - DNA, 22 bp, Artificial Sequence
  Description of Artificial Sequence: Synthetic oligonucleotide
aaggtagcgataattttacgtg

SEQ ID NO: 9445 - DNA, 23 bp, Artificial Sequence
  Description of Artificial Sequence: Synthetic oligonucleotide
gcgataattttacgtggatagga

SEQ ID NO: 9446 - DNA, 22 bp, Artificial Sequence
  Description of Artificial Sequence: Synthetic oligonucleotide
ataatccaaacgcgaaaatact

SEQ ID NO: 9447 - DNA, 20 bp, Artificial Sequence
  Description of Artificial Sequence: Synthetic oligonucleotide
gggtagagagtatcgttgcg

SEQ ID NO: 9448 - DNA, 24 bp, Artificial Sequence
  Description of Artificial Sequence: Synthetic oligonucleotide
tagcgataattttacgtggatagg

SEQ ID NO: 9449 - DNA, 22 bp, Artificial Sequence
  Description of Artificial Sequence: Synthetic oligonucleotide
gtagcgataattttacgtggat

SEQ ID NO: 9450 - DNA, 21 bp, Artificial Sequence
  Description of Artificial Sequence: Synthetic oligonucleotide
ttaaagtgggatcgtcgtagt

SEQ ID NO: 9451 - DNA, 22 bp, Artificial Sequence
  Description of Artificial Sequence: Synthetic oligonucleotide
agcgataattttacgtggatag

SEQ ID NO: 9452 - DNA, 23 bp, Artificial Sequence
  Description of Artificial Sequence: Synthetic oligonucleotide
ccgaacgctaaatactaaaaacg

SEQ ID NO: 9453 - DNA, 21 bp, Artificial Sequence
  Description of Artificial Sequence: Synthetic oligonucleotide
cgcaaatacgaaactaccgac

SEQ ID NO: 9454 - DNA, 21 bp, Artificial Sequence
  Description of Artificial Sequence: Synthetic oligonucleotide
aactttcccgataccgaatac

SEQ ID NO: 9455 - DNA, 20 bp, Artificial Sequence
  Description of Artificial Sequence: Synthetic oligonucleotide
gaaccgaacgacgaaataaa

SEQ ID NO: 9456 - DNA, 22 bp, Artificial Sequence
  Description of Artificial Sequence: Synthetic oligonucleotide
ttgcgcgtttttagtatttagc

SEQ ID NO: 9457 - DNA, 22 bp, Artificial Sequence
  Description of Artificial Sequence: Synthetic oligonucleotide
aacgcgaaaatactaacccaaa

SEQ ID NO: 9458 - DNA, 20 bp, Artificial Sequence
  Description of Artificial Sequence: Synthetic oligonucleotide
cgaaaaatcacaaacgccta

SEQ ID NO: 9459 - DNA, 21 bp, Artificial Sequence
  Description of Artificial Sequence: Synthetic oligonucleotide
cgccgaacgctaaatactaaa

SEQ ID NO: 9460 - DNA, 21 bp, Artificial Sequence
  Description of Artificial Sequence: Synthetic oligonucleotide
agttgcgcgtttttagtattt

SEQ ID NO: 9461 - DNA, 23 bp, Artificial Sequence
  Description of Artificial Sequence: Synthetic oligonucleotide
ttagggtagagagtatcgttgcg

SEQ ID NO: 9462 - DNA, 20 bp, Artificial Sequence
  Description of Artificial Sequence: Synthetic oligonucleotide
aacccgcaataaccgataac

SEQ ID NO: 9463 - DNA, 29 bp, Artificial Sequence
  Description of Artificial Sequence: Synthetic oligonucleotide
atttgcgtagggaggtggggcgggggcga

SEQ ID NO: 9464 - DNA, 21 bp, Artificial Sequence
  Description of Artificial Sequence: Synthetic oligonucleotide
aagtgggatcgtcgtagttga

SEQ ID NO: 9465 - DNA, 21 bp, Artificial Sequence
  Description of Artificial Sequence: Synthetic oligonucleotide
gtgggatcgtcgtagttgaaa

SEQ ID NO: 9466 - DNA, 20 bp, Artificial Sequence
  Description of Artificial Sequence: Synthetic oligonucleotide
tacgaaactaccgacaacgc

SEQ ID NO: 9467 - DNA, 20 bp, Artificial Sequence
  Description of Artificial Sequence: Synthetic oligonucleotide
cgcaaatacgaaactaccga

SEQ ID NO: 9468 - DNA, 21 bp, Artificial Sequence
  Description of Artificial Sequence: Synthetic oligonucleotide
tccaaacgcgaaaatactaac

SEQ ID NO: 9469 - DNA, 21 bp, Artificial Sequence
  Description of Artificial Sequence: Synthetic oligonucleotide
ggatcgtcgtagttgaaaagt

SEQ ID NO: 9470 - DNA, 21 bp, Artificial Sequence
  Description of Artificial Sequence: Synthetic oligonucleotide
aatcgacaataactctccgac

SEQ ID NO: 9471 - DNA, 22 bp, Artificial Sequence
  Description of Artificial Sequence: Synthetic oligonucleotide
attcgagcggttgtagttttta

SEQ ID NO: 9472 - DNA, 23 bp, Artificial Sequence
  Description of Artificial Sequence: Synthetic oligonucleotide
aggggagggattcgcgatcgcgt

SEQ ID NO: 9473 - DNA, 24 bp, Artificial Sequence
  Description of Artificial Sequence: Synthetic oligonucleotide
ttaaggtagcgataattttacgtg

SEQ ID NO: 9474 - DNA, 21 bp, Artificial Sequence
  Description of Artificial Sequence: Synthetic oligonucleotide
atcgacaataactctccgacc

SEQ ID NO: 9475 - DNA, 20 bp, Artificial Sequence
  Description of Artificial Sequence: Synthetic oligonucleotide
tttcgcgtcgtttttatttc

SEQ ID NO: 9476 - DNA, 30 bp, Artificial Sequence
  Description of Artificial Sequence: Synthetic oligonucleotide
ggtcgattcgagcggttgtagtttttaggt

SEQ ID NO: 9477 - DNA, 21 bp, Artificial Sequence
  Description of Artificial Sequence: Synthetic oligonucleotide
ggtagagagtatcgttgcggt

SEQ ID NO: 9478 - DNA, 25 bp, Artificial Sequence
  Description of Artificial Sequence: Synthetic oligonucleotide
tttaaggtagcgataattttacgtg

SEQ ID NO: 9479 - DNA, 21 bp, Artificial Sequence
  Description of Artificial Sequence: Synthetic oligonucleotide
acgcaaatacgaaactaccga

SEQ ID NO: 9480 - DNA, 20 bp, Artificial Sequence
  Description of Artificial Sequence: Synthetic oligonucleotide
tgggatcgtcgtagttgaaa

SEQ ID NO: 9481 - DNA, 36 bp, Artificial Sequence
  Description of Artificial Sequence: Synthetic oligonucleotide
ttcgattagtgtttggagattagaacgcgagttttt

SEQ ID NO: 9482 - DNA, 22 bp, Artificial Sequence
  Description of Artificial Sequence: Synthetic oligonucleotide
aaacgcttaaaaaccgaatacc

SEQ ID NO: 9483 - DNA, 20 bp, Artificial Sequence
  Description of Artificial Sequence: Synthetic oligonucleotide
gtcgatttcggaagggatag

SEQ ID NO: 9484 - DNA, 25 bp, Artificial Sequence
  Description of Artificial Sequence: Synthetic oligonucleotide
agagtatcgttgcggttcgagcggt

SEQ ID NO: 9485 - DNA, 19 bp, Artificial Sequence
  Description of Artificial Sequence: Synthetic oligonucleotide
acgtattcggtatcgggaa

SEQ ID NO: 9486 - DNA, 31 bp, Artificial Sequence
  Description of Artificial Sequence: Synthetic oligonucleotide
aggcgtttgtgatttttcgaaggattttggg

SEQ ID NO: 9487 - DNA, 22 bp, Artificial Sequence
  Description of Artificial Sequence: Synthetic oligonucleotide
aaaaacgcttaaaaaccgaata

SEQ ID NO: 9488 - DNA, 22 bp, Artificial Sequence
  Description of Artificial Sequence: Synthetic oligonucleotide
gaaaaacgcttaaaaaccgaat

SEQ ID NO: 9489 - DNA, 20 bp, Artificial Sequence
  Description of Artificial Sequence: Synthetic oligonucleotide
cctaacaaaaacgcgaacat

SEQ ID NO: 9490 - DNA, 21 bp, Artificial Sequence
  Description of Artificial Sequence: Synthetic oligonucleotide
ttcggtatcgggaaagtttag

SEQ ID NO: 9491 - DNA, 38 bp, Artificial Sequence
  Description of Artificial Sequence: Synthetic oligonucleotide
atttttcgaaggattttgggttagtattttcgcgtttg

SEQ ID NO: 9492 - DNA, 22 bp, Artificial Sequence
  Description of Artificial Sequence: Synthetic oligonucleotide
aatcgacaataactctccgacc

SEQ ID NO: 9493 - DNA, 21 bp, Artificial Sequence
  Description of Artificial Sequence: Synthetic oligonucleotide
cgagcggttgtagtttttagg

SEQ ID NO: 9494 - DNA, 23 bp, Artificial Sequence
  Description of Artificial Sequence: Synthetic oligonucleotide
taaggtagcgataattttacgtg

SEQ ID NO: 9495 - DNA, 19 bp, Artificial Sequence
  Description of Artificial Sequence: Synthetic oligonucleotide
acctccctacgcaaatacg

SEQ ID NO: 9496 - DNA, 24 bp, Artificial Sequence
  Description of Artificial Sequence: Synthetic oligonucleotide
aaattattaaagtgggatcgtcgt

SEQ ID NO: 9497 - DNA, 22 bp, Artificial Sequence
  Description of Artificial Sequence: Synthetic oligonucleotide
aaaaatcgacaataactctccg

SEQ ID NO: 9498 - DNA, 20 bp, Artificial Sequence
  Description of Artificial Sequence: Synthetic oligonucleotide
gattcgagcggttgtagttt

SEQ ID NO: 9499 - DNA, 21 bp, Artificial Sequence
  Description of Artificial Sequence: Synthetic oligonucleotide
acgcctaaactttcccgatac

SEQ ID NO: 9500 - DNA, 20 bp, Artificial Sequence
  Description of Artificial Sequence: Synthetic oligonucleotide
cgacaataactctccgaccc

SEQ ID NO: 9501 - DNA, 24 bp, Artificial Sequence
  Description of Artificial Sequence: Synthetic oligonucleotide
taaggtagcgataattttacgtgg

SEQ ID NO: 9502 - DNA, 20 bp, Artificial Sequence
  Description of Artificial Sequence: Synthetic oligonucleotide
cgtattcggtatcgggaaag

SEQ ID NO: 9503 - DNA, 21 bp, Artificial Sequence
  Description of Artificial Sequence: Synthetic oligonucleotide
attaaagtgggatcgtcgtag

SEQ ID NO: 9504 - DNA, 21 bp, Artificial Sequence
  Description of Artificial Sequence: Synthetic oligonucleotide
cctaaataatccaaacgcgaa

SEQ ID NO: 9505 - DNA, 22 bp, Artificial Sequence
  Description of Artificial Sequence: Synthetic oligonucleotide
aaatcgacaataactctccgac

SEQ ID NO: 9506 - DNA, 21 bp, Artificial Sequence
  Description of Artificial Sequence: Synthetic oligonucleotide
gtttggagattagaacgcgag

SEQ ID NO: 9507 - DNA, 31 bp, Artificial Sequence
  Description of Artificial Sequence: Synthetic oligonucleotide
tacgtattcggtatcgggaaagtttaggcgt

SEQ ID NO: 9508 - DNA, 20 bp, Artificial Sequence
  Description of Artificial Sequence: Synthetic oligonucleotide
cgacttctacctacaccccg

SEQ ID NO: 9509 - DNA, 22 bp, Artificial Sequence
  Description of Artificial Sequence: Synthetic oligonucleotide
ttagtattttcgcgtttggatt

SEQ ID NO: 9510 - DNA, 44 bp, Artificial Sequence
  Description of Artificial Sequence: Synthetic oligonucleotide
tacgttataagaaagatgtgggggagatttcgatgttcgcgttt

SEQ ID NO: 9511 - DNA, 23 bp, Artificial Sequence
  Description of Artificial Sequence: Synthetic oligonucleotide
tagcgataattttacgtggatag

SEQ ID NO: 9512 - DNA, 22 bp, Artificial Sequence
  Description of Artificial Sequence: Synthetic oligonucleotide
ttcgagcggttgtagtttttag

SEQ ID NO: 9513 - DNA, 20 bp, Artificial Sequence
  Description of Artificial Sequence: Synthetic oligonucleotide
cgcctaaactttcccgatac

SEQ ID NO: 9514 - DNA, 19 bp, Artificial Sequence
  Description of Artificial Sequence: Synthetic oligonucleotide
acccgcaataaccgataac

SEQ ID NO: 9515 - DNA, 22 bp, Artificial Sequence
  Description of Artificial Sequence: Synthetic oligonucleotide
tattttcgcgtttggattattt

SEQ ID NO: 9516 - DNA, 22 bp, Artificial Sequence
  Description of Artificial Sequence: Synthetic oligonucleotide
attttcgcgtttggattattta

SEQ ID NO: 9517 - DNA, 21 bp, Artificial Sequence
  Description of Artificial Sequence: Synthetic oligonucleotide
tgcgcgtttttagtatttagc

SEQ ID NO: 9518 - DNA, 20 bp, Artificial Sequence
  Description of Artificial Sequence: Synthetic oligonucleotide
tttggagattagaacgcgag

SEQ ID NO: 9519 - DNA, 19 bp, Artificial Sequence
  Description of Artificial Sequence: Synthetic oligonucleotide
aaaacgcgaacatcgaaat

SEQ ID NO: 9520 - DNA, 22 bp, Artificial Sequence
  Description of Artificial Sequence: Synthetic oligonucleotide
attcggtatcgggaaagtttag

SEQ ID NO: 9521 - DNA, 23 bp, Artificial Sequence
  Description of Artificial Sequence: Synthetic oligonucleotide
attattaaagtgggatcgtcgta

SEQ ID NO: 9522 - DNA, 22 bp, Artificial Sequence
  Description of Artificial Sequence: Synthetic oligonucleotide
aaaacgcttaaaaaccgaatac

SEQ ID NO: 9523 - DNA, 20 bp, Artificial Sequence
  Description of Artificial Sequence: Synthetic oligonucleotide
cgcgacttctacctacaccc

SEQ ID NO: 9524 - DNA, 20 bp, Artificial Sequence
  Description of Artificial Sequence: Synthetic oligonucleotide
acgcctaaactttcccgata

SEQ ID NO: 9525 - DNA, 24 bp, Artificial Sequence
  Description of Artificial Sequence: Synthetic oligonucleotide
attattaaagtgggatcgtcgtag

SEQ ID NO: 9526 - DNA, 19 bp, Artificial Sequence
  Description of Artificial Sequence: Synthetic oligonucleotide
cctccctacgcaaatacga

SEQ ID NO: 9527 - DNA, 19 bp, Artificial Sequence
  Description of Artificial Sequence: Synthetic oligonucleotide
tcgatttcggaagggatag

SEQ ID NO: 9528 - DNA, 20 bp, Artificial Sequence
  Description of Artificial Sequence: Synthetic oligonucleotide
gcgcgacttctacctacacc

SEQ ID NO: 9529 - DNA, 22 bp, Artificial Sequence
  Description of Artificial Sequence: Synthetic oligonucleotide
ttttcgcgtttggattatttag

SEQ ID NO: 9530 - DNA, 19 bp, Artificial Sequence
  Description of Artificial Sequence: Synthetic oligonucleotide
cggagtttcgcgtattttt

SEQ ID NO: 9531 - DNA, 31 bp, Artificial Sequence
  Description of Artificial Sequence: Synthetic oligonucleotide
aatttaggttttttcgggagttttggggcgg

SEQ ID NO: 9532 - DNA, 19 bp, Artificial Sequence
  Description of Artificial Sequence: Synthetic oligonucleotide
aaactaccgacaacgcgac

SEQ ID NO: 9533 - DNA, 20 bp, Artificial Sequence
  Description of Artificial Sequence: Synthetic oligonucleotide
gaacccgcaataaccgataa

SEQ ID NO: 9534 - DNA, 19 bp, Artificial Sequence
  Description of Artificial Sequence: Synthetic oligonucleotide
acgaaactaccgacaacgc

SEQ ID NO: 9535 - DNA, 22 bp, Artificial Sequence
  Description of Artificial Sequence: Synthetic oligonucleotide
aaacgcgaaaatactaacccaa

SEQ ID NO: 9536 - DNA, 24 bp, Artificial Sequence
  Description of Artificial Sequence: Synthetic oligonucleotide
aattattaaagtgggatcgtcgta

SEQ ID NO: 9537 - DNA, 21 bp, Artificial Sequence
  Description of Artificial Sequence: Synthetic oligonucleotide
aacgcctaaactttcccgata

SEQ ID NO: 9538 - DNA, 18 bp, Artificial Sequence
  Description of Artificial Sequence: Synthetic oligonucleotide
cctacgtccccgaaaaac

SEQ ID NO: 9539 - DNA, 22 bp, Artificial Sequence
  Description of Artificial Sequence: Synthetic oligonucleotide
gtagagagtatcgttgcggttc

SEQ ID NO: 9540 - DNA, 26 bp, Artificial Sequence
  Description of Artificial Sequence: Synthetic oligonucleotide
ttcgagcggttcgggtttttaggcgt

SEQ ID NO: 9541 - DNA, 18 bp, Artificial Sequence
  Description of Artificial Sequence: Synthetic oligonucleotide
gtaaacgcctacgtcccc

SEQ ID NO: 9542 - DNA, 23 bp, Artificial Sequence
  Description of Artificial Sequence: Synthetic oligonucleotide
aacgacgaaataaataacccctt

SEQ ID NO: 9543 - DNA, 21 bp, Artificial Sequence
  Description of Artificial Sequence: Synthetic oligonucleotide
aacgcttaaaaaccgaatacc

SEQ ID NO: 9544 - DNA, 22 bp, Artificial Sequence
  Description of Artificial Sequence: Synthetic oligonucleotide
gttagtattttcgcgtttggat

SEQ ID NO: 9545 - DNA, 20 bp, Artificial Sequence
  Description of Artificial Sequence: Synthetic oligonucleotide
aaaaacgcgaacatcgaaat

SEQ ID NO: 9546 - DNA, 21 bp, Artificial Sequence
  Description of Artificial Sequence: Synthetic oligonucleotide
acctaacaaaaacgcgaacat

SEQ ID NO: 9547 - DNA, 21 bp, Artificial Sequence
  Description of Artificial Sequence: Synthetic oligonucleotide
gtatcgggaaagtttaggcgt

SEQ ID NO: 9548 - DNA, 18 bp, Artificial Sequence
  Description of Artificial Sequence: Synthetic oligonucleotide
tcacgaacccgcaataac

SEQ ID NO: 9549 - DNA, 20 bp, Artificial Sequence
  Description of Artificial Sequence: Synthetic oligonucleotide
cggtatcgggaaagtttagg

SEQ ID NO: 9550 - DNA, 22 bp, Artificial Sequence
  Description of Artificial Sequence: Synthetic oligonucleotide
gtattttcgcgtttggattatt

SEQ ID NO: 9551 - DNA, 22 bp, Artificial Sequence
  Description of Artificial Sequence: Synthetic oligonucleotide
tacgttcggttaatttttggat

SEQ ID NO: 9552 - DNA, 22 bp, Artificial Sequence
  Description of Artificial Sequence: Synthetic oligonucleotide
acgcaataactcacgcctataa

SEQ ID NO: 9553 - DNA, 33 bp, Artificial Sequence
  Description of Artificial Sequence: Synthetic oligonucleotide
aacgtttgattttaggtgattcgttcgtttcgg

SEQ ID NO: 9554 - DNA, 21 bp, Artificial Sequence
  Description of Artificial Sequence: Synthetic oligonucleotide
cgcaataactcacgcctataa

SEQ ID NO: 9555 - DNA, 22 bp, Artificial Sequence
  Description of Artificial Sequence: Synthetic oligonucleotide
ttacgttcggttaatttttgga

SEQ ID NO: 9556 - DNA, 22 bp, Artificial Sequence
  Description of Artificial Sequence: Synthetic oligonucleotide
acgttcggttaatttttggatt

SEQ ID NO: 9557 - DNA, 21 bp, Artificial Sequence
  Description of Artificial Sequence: Synthetic oligonucleotide
cgttcggttaatttttggatt

SEQ ID NO: 9558 - DNA, 21 bp, Artificial Sequence
  Description of Artificial Sequence: Synthetic oligonucleotide
aacgcaataactcacgcctat

SEQ ID NO: 9559 - DNA, 23 bp, Artificial Sequence
  Description of Artificial Sequence: Synthetic oligonucleotide
attacgttcggttaatttttgga

SEQ ID NO: 9560 - DNA, 22 bp, Artificial Sequence
  Description of Artificial Sequence: Synthetic oligonucleotide
tcgtttaaggcgaagaatttta

SEQ ID NO: 9561 - DNA, 19 bp, Artificial Sequence
  Description of Artificial Sequence: Synthetic oligonucleotide
ctatacgaacctcccctcg

SEQ ID NO: 9562 - DNA, 22 bp, Artificial Sequence
  Description of Artificial Sequence: Synthetic oligonucleotide
gaaggcgggggtatagcggcgg

SEQ ID NO: 9563 - DNA, 24 bp, Artificial Sequence
  Description of Artificial Sequence: Synthetic oligonucleotide
tattacgttcggttaatttttgga

SEQ ID NO: 9564 - DNA, 22 bp, Artificial Sequence
  Description of Artificial Sequence: Synthetic oligonucleotide
tttaaggcgaagaattttaacg

SEQ ID NO: 9565 - DNA, 22 bp, Artificial Sequence
  Description of Artificial Sequence: Synthetic oligonucleotide
cggtagcgtttgttgtttttat

SEQ ID NO: 9566 - DNA, 18 bp, Artificial Sequence
  Description of Artificial Sequence: Synthetic oligonucleotide
atttcgggtcggagtgtt

SEQ ID NO: 9567 - DNA, 22 bp, Artificial Sequence
  Description of Artificial Sequence: Synthetic oligonucleotide
acgaaactaacacgctaacgat

SEQ ID NO: 9568 - DNA, 22 bp, Artificial Sequence
  Description of Artificial Sequence: Synthetic oligonucleotide
ttaggcgtcggcggtagggcgg

SEQ ID NO: 9569 - DNA, 18 bp, Artificial Sequence
  Description of Artificial Sequence: Synthetic oligonucleotide
aatttcgggtcggagtgt

SEQ ID NO: 9570 - DNA, 22 bp, Artificial Sequence
  Description of Artificial Sequence: Synthetic oligonucleotide
tccgacgctaaataataccaac

SEQ ID NO: 9571 - DNA, 19 bp, Artificial Sequence
  Description of Artificial Sequence: Synthetic oligonucleotide
gtcgtattttcgtttgggg

SEQ ID NO: 9572 - DNA, 22 bp, Artificial Sequence
  Description of Artificial Sequence: Synthetic oligonucleotide
ggggtagcggcggtacggtcgt

SEQ ID NO: 9573 - DNA, 22 bp, Artificial Sequence
  Description of Artificial Sequence: Synthetic oligonucleotide
aaacctcaacgaaaaactacga

SEQ ID NO: 9574 - DNA, 19 bp, Artificial Sequence
  Description of Artificial Sequence: Synthetic oligonucleotide
gtcgggttttaagcgtttc

SEQ ID NO: 9575 - DNA, 36 bp, Artificial Sequence
  Description of Artificial Sequence: Synthetic oligonucleotide
ttcgttatttggtgggggtagtaggcgttatcgatt

SEQ ID NO: 9576 - DNA, 20 bp, Artificial Sequence
  Description of Artificial Sequence: Synthetic oligonucleotide
cgtattttcgtttggggaag

SEQ ID NO: 9577 - DNA, 22 bp, Artificial Sequence
  Description of Artificial Sequence: Synthetic oligonucleotide
ctccgacgctaaataataccaa

SEQ ID NO: 9578 - DNA, 22 bp, Artificial Sequence
  Description of Artificial Sequence: Synthetic oligonucleotide
cgacgctaaataataccaacaa

SEQ ID NO: 9579 - DNA, 22 bp, Artificial Sequence
  Description of Artificial Sequence: Synthetic oligonucleotide
ccgacgctaaataataccaaca

SEQ ID NO: 9580 - DNA, 20 bp, Artificial Sequence
  Description of Artificial Sequence: Synthetic oligonucleotide
aaaactccgtccgacaaaac

SEQ ID NO: 9581 - DNA, 22 bp, Artificial Sequence
  Description of Artificial Sequence: Synthetic oligonucleotide
tgttggtattatttagcgtcgg

SEQ ID NO: 9582 - DNA, 31 bp, Artificial Sequence
  Description of Artificial Sequence: Synthetic oligonucleotide
gggtgttttgtcgcgatatatcgatagtcgg

SEQ ID NO: 9583 - DNA, 20 bp, Artificial Sequence
  Description of Artificial Sequence: Synthetic oligonucleotide
gtcgtattttcgtttgggga

SEQ ID NO: 9584 - DNA, 19 bp, Artificial Sequence
  Description of Artificial Sequence: Synthetic oligonucleotide
tcgtattttcgtttgggga

SEQ ID NO: 9585 - DNA, 22 bp, Artificial Sequence
  Description of Artificial Sequence: Synthetic oligonucleotide
tctccgacgctaaataatacca

SEQ ID NO: 9586 - DNA, 19 bp, Artificial Sequence
  Description of Artificial Sequence: Synthetic oligonucleotide
aaactccgtccgacaaaac

SEQ ID NO: 9587 - DNA, 23 bp, Artificial Sequence
  Description of Artificial Sequence: Synthetic oligonucleotide
aatctccgacgctaaataatacc

SEQ ID NO: 9588 - DNA, 22 bp, Artificial Sequence
  Description of Artificial Sequence: Synthetic oligonucleotide
acctcaacgaaaaactacgaaa

SEQ ID NO: 9589 - DNA, 18 bp, Artificial Sequence
  Description of Artificial Sequence: Synthetic oligonucleotide
cgtcgggttttaagcgtt

SEQ ID NO: 9590 - DNA, 36 bp, Artificial Sequence
  Description of Artificial Sequence: Synthetic oligonucleotide
atttcgttatttggtgggggtagtaggcgttatcga

SEQ ID NO: 9591 - DNA, 22 bp, Artificial Sequence
  Description of Artificial Sequence: Synthetic oligonucleotide
atctccgacgctaaataatacc

SEQ ID NO: 9592 - DNA, 18 bp, Artificial Sequence
  Description of Artificial Sequence: Synthetic oligonucleotide
tcgtcgggttttaagcgt

SEQ ID NO: 9593 - DNA, 21 bp, Artificial Sequence
  Description of Artificial Sequence: Synthetic oligonucleotide
caaatctccgacgctaaataa

SEQ ID NO: 9594 - DNA, 21 bp, Artificial Sequence
  Description of Artificial Sequence: Synthetic oligonucleotide
gttggtattatttagcgtcgg

SEQ ID NO: 9595 - DNA, 18 bp, Artificial Sequence
  Description of Artificial Sequence: Synthetic oligonucleotide
tcgggttttaagcgtttc

SEQ ID NO: 9596 - DNA, 20 bp, Artificial Sequence
  Description of Artificial Sequence: Synthetic oligonucleotide
cgcgacaaaacaccctatac

SEQ ID NO: 9597 - DNA, 38 bp, Artificial Sequence
  Description of Artificial Sequence: Synthetic oligonucleotide
tggtcgaggttttgttggtattatttagcgtcggagat

SEQ ID NO: 9598 - DNA, 22 bp, Artificial Sequence
  Description of Artificial Sequence: Synthetic oligonucleotide
tcgaggttatagtcgtggtttc

SEQ ID NO: 9599 - DNA, 22 bp, Artificial Sequence
  Description of Artificial Sequence: Synthetic oligonucleotide
gaaaaataaatacaacgcgctc

SEQ ID NO: 9600 - DNA, 25 bp, Artificial Sequence
  Description of Artificial Sequence: Synthetic oligonucleotide
tgttcgtgacgggcgttttcgagga

SEQ ID NO: 9601 - DNA, 22 bp, Artificial Sequence
  Description of Artificial Sequence: Synthetic oligonucleotide
aaaataaatacaacgcgctcat

SEQ ID NO: 9602 - DNA, 22 bp, Artificial Sequence
  Description of Artificial Sequence: Synthetic oligonucleotide
gaggttatagtcgtggtttcgt

SEQ ID NO: 9603 - DNA, 22 bp, Artificial Sequence
  Description of Artificial Sequence: Synthetic oligonucleotide
aaaaataaatacaacgcgctca

SEQ ID NO: 9604 - DNA, 22 bp, Artificial Sequence
  Description of Artificial Sequence: Synthetic oligonucleotide
aggttatagtcgtggtttcgtt

SEQ ID NO: 9605 - DNA, 22 bp, Artificial Sequence
  Description of Artificial Sequence: Synthetic oligonucleotide
atcgaggttatagtcgtggttt

SEQ ID NO: 9606 - DNA, 23 bp, Artificial Sequence
  Description of Artificial Sequence: Synthetic oligonucleotide
aaataaatacaacgcgctcatta

SEQ ID NO: 9607 - DNA, 22 bp, Artificial Sequence
  Description of Artificial Sequence: Synthetic oligonucleotide
aataaatacaacgcgctcatta

SEQ ID NO: 9608 - DNA, 21 bp, Artificial Sequence
  Description of Artificial Sequence: Synthetic oligonucleotide
gttttcgaggacgaagttgat

SEQ ID NO: 9609 - DNA, 22 bp, Artificial Sequence
  Description of Artificial Sequence: Synthetic oligonucleotide
aacccgatacaaaatctacgaa

SEQ ID NO: 9610 - DNA, 37 bp, Artificial Sequence
  Description of Artificial Sequence: Synthetic oligonucleotide
gaattcgcgtttgagtcgtcgtttcggattttcggtg

SEQ ID NO: 9611 - DNA, 22 bp, Artificial Sequence
  Description of Artificial Sequence: Synthetic oligonucleotide
aaacccgatacaaaatctacga

SEQ ID NO: 9612 - DNA, 23 bp, Artificial Sequence
  Description of Artificial Sequence: Synthetic oligonucleotide
ttttatcgaggttatagtcgtgg

SEQ ID NO: 9613 - DNA, 23 bp, Artificial Sequence
  Description of Artificial Sequence: Synthetic oligonucleotide
atcgaggttatagtcgtggtttc

SEQ ID NO: 9614 - DNA, 22 bp, Artificial Sequence
  Description of Artificial Sequence: Synthetic oligonucleotide
gtttagtttattttgcggtcgt

SEQ ID NO: 9615 - DNA, 22 bp, Artificial Sequence
  Description of Artificial Sequence: Synthetic oligonucleotide
aaaccacgactataacctcgat

SEQ ID NO: 9616 - DNA, 30 bp, Artificial Sequence
  Description of Artificial Sequence: Synthetic oligonucleotide
agggaggtcgttggtattcgtgatttacga

SEQ ID NO: 9617 - DNA, 22 bp, Artificial Sequence
  Description of Artificial Sequence: Synthetic oligonucleotide
tttatcgaggttatagtcgtgg

SEQ ID NO: 9618 - DNA, 22 bp, Artificial Sequence
  Description of Artificial Sequence: Synthetic oligonucleotide
ttagtttattttgcggtcgttt

SEQ ID NO: 9619 - DNA, 23 bp, Artificial Sequence
  Description of Artificial Sequence: Synthetic oligonucleotide
aaccacgactataacctcgataa

SEQ ID NO: 9620 - DNA, 31 bp, Artificial Sequence
  Description of Artificial Sequence: Synthetic oligonucleotide
gggaggtcgttggtattcgtgatttacgatt

SEQ ID NO: 9621 - DNA, 23 bp, Artificial Sequence
  Description of Artificial Sequence: Synthetic oligonucleotide
ttatcgaggttatagtcgtggtt

SEQ ID NO: 9622 - DNA, 23 bp, Artificial Sequence
  Description of Artificial Sequence: Synthetic oligonucleotide
tatcgaggttatagtcgtggttt

SEQ ID NO: 9623 - DNA, 22 bp, Artificial Sequence
  Description of Artificial Sequence: Synthetic oligonucleotide
acccgatacaaaatctacgaac

SEQ ID NO: 9624 - DNA, 23 bp, Artificial Sequence
  Description of Artificial Sequence: Synthetic oligonucleotide
gaaaccacgactataacctcgat

SEQ ID NO: 9625 - DNA, 21 bp, Artificial Sequence
  Description of Artificial Sequence: Synthetic oligonucleotide
ttttcgaggacgaagttgatt

SEQ ID NO: 9626 - DNA, 24 bp, Artificial Sequence
  Description of Artificial Sequence: Synthetic oligonucleotide
gttttatcgaggttatagtcgtgg

SEQ ID NO: 9627 - DNA, 20 bp, Artificial Sequence
  Description of Artificial Sequence: Synthetic oligonucleotide
attttgatcgggtcgttttt

SEQ ID NO: 9628 - DNA, 22 bp, Artificial Sequence
  Description of Artificial Sequence: Synthetic oligonucleotide
attattctacacgtcaatcccg

SEQ ID NO: 9629 - DNA, 34 bp, Artificial Sequence
  Description of Artificial Sequence: Synthetic oligonucleotide
ttcggtgttcgtcggttcgtagattttgtatcgg

SEQ ID NO: 9630 - DNA, 22 bp, Artificial Sequence
  Description of Artificial Sequence: Synthetic oligonucleotide
cgatacaaaatctacgaaccga

SEQ ID NO: 9631 - DNA, 22 bp, Artificial Sequence
  Description of Artificial Sequence: Synthetic oligonucleotide
accacgactataacctcgataa

SEQ ID NO: 9632 - DNA, 22 bp, Artificial Sequence
  Description of Artificial Sequence: Synthetic oligonucleotide
tttagtttattttgcggtcgtt

SEQ ID NO: 9633 - DNA, 22 bp, Artificial Sequence
  Description of Artificial Sequence: Synthetic oligonucleotide
tatcgaggttatagtcgtggtt

SEQ ID NO: 9634 - DNA, 21 bp, Artificial Sequence
  Description of Artificial Sequence: Synthetic oligonucleotide
aaaataaatacaacgcgctca

SEQ ID NO: 9635 - DNA, 21 bp, Artificial Sequence
  Description of Artificial Sequence: Synthetic oligonucleotide
aaaatctacgaaccgacgaac

SEQ ID NO: 9636 - DNA, 41 bp, Artificial Sequence
  Description of Artificial Sequence: Synthetic oligonucleotide
ttattggaattcgcgtttgagtcgtcgtttcggattttcgg

SEQ ID NO: 9637 - DNA, 22 bp, Artificial Sequence
  Description of Artificial Sequence: Synthetic oligonucleotide
actacgaatccaaacccgatac

SEQ ID NO: 9638 - DNA, 20 bp, Artificial Sequence
  Description of Artificial Sequence: Synthetic oligonucleotide
gttttcgaggacgaagttga

SEQ ID NO: 9639 - DNA, 22 bp, Artificial Sequence
  Description of Artificial Sequence: Synthetic oligonucleotide
caaacccgatacaaaatctacg

SEQ ID NO: 9640 - DNA, 21 bp, Artificial Sequence
  Description of Artificial Sequence: Synthetic oligonucleotide
cgaggttatagtcgtggtttc

SEQ ID NO: 9641 - DNA, 21 bp, Artificial Sequence
  Description of Artificial Sequence: Synthetic oligonucleotide
ctacgaatccaaacccgatac

SEQ ID NO: 9642 - DNA, 26 bp, Artificial Sequence
  Description of Artificial Sequence: Synthetic oligonucleotide
tttgttcgtgacgggcgttttcgagg

SEQ ID NO: 9643 - DNA, 20 bp, Artificial Sequence
  Description of Artificial Sequence: Synthetic oligonucleotide
tttcgaggacgaagttgatt

SEQ ID NO: 9644 - DNA, 20 bp, Artificial Sequence
  Description of Artificial Sequence: Synthetic oligonucleotide
ttttcgaggacgaagttgat

SEQ ID NO: 9645 - DNA, 20 bp, Artificial Sequence
  Description of Artificial Sequence: Synthetic oligonucleotide
gattttgatcgggtcgtttt

SEQ ID NO: 9646 - DNA, 23 bp, Artificial Sequence
  Description of Artificial Sequence: Synthetic oligonucleotide
ttcggtcgtgtttatatttgttc

SEQ ID NO: 9647 - DNA, 21 bp, Artificial Sequence
  Description of Artificial Sequence: Synthetic oligonucleotide
aaatcaacttcgtcctcgaaa

SEQ ID NO: 9648 - DNA, 40 bp, Artificial Sequence
  Description of Artificial Sequence: Synthetic oligonucleotide
ggatgatttagtattgaaaagtttcggtcggtttttttag

SEQ ID NO: 9649 - DNA, 22 bp, Artificial Sequence
  Description of Artificial Sequence: Synthetic oligonucleotide
tacaaaatctacgaaccgacga

SEQ ID NO: 9650 - DNA, 22 bp, Artificial Sequence
  Description of Artificial Sequence: Synthetic oligonucleotide
aaccacgactataacctcgata

SEQ ID NO: 9651 - DNA, 21 bp, Artificial Sequence
  Description of Artificial Sequence: Synthetic oligonucleotide
gtttagtttattttgcggtcg

SEQ ID NO: 9652 - DNA, 22 bp, Artificial Sequence
  Description of Artificial Sequence: Synthetic oligonucleotide
acgaaaccacgactataacctc

SEQ ID NO: 9653 - DNA, 22 bp, Artificial Sequence
  Description of Artificial Sequence: Synthetic oligonucleotide
cccgatacaaaatctacgaacc

SEQ ID NO: 9654 - DNA, 22 bp, Artificial Sequence
  Description of Artificial Sequence: Synthetic oligonucleotide
tcggtcgtgtttatatttgttc

SEQ ID NO: 9655 - DNA, 40 bp, Artificial Sequence
  Description of Artificial Sequence: Synthetic oligonucleotide
gatgatttagtattgaaaagtttcggtcggtttttttagg

SEQ ID NO: 9656 - DNA, 19 bp, Artificial Sequence
  Description of Artificial Sequence: Synthetic oligonucleotide
ttttgatcgggtcgttttt

SEQ ID NO: 9657 - DNA, 21 bp, Artificial Sequence
  Description of Artificial Sequence: Synthetic oligonucleotide
ttcgaggacgaagttgatttt

SEQ ID NO: 9658 - DNA, 21 bp, Artificial Sequence
  Description of Artificial Sequence: Synthetic oligonucleotide
tttcgaggacgaagttgattt

SEQ ID NO: 9659 - DNA, 21 bp, Artificial Sequence
  Description of Artificial Sequence: Synthetic oligonucleotide
cgcccgaaaaataaatacaac

SEQ ID NO: 9660 - DNA, 21 bp, Artificial Sequence
  Description of Artificial Sequence: Synthetic oligonucleotide
cccgaaaaataaatacaacgc

SEQ ID NO: 9661 - DNA, 21 bp, Artificial Sequence
  Description of Artificial Sequence: Synthetic oligonucleotide
ggttatagtcgtggtttcgtt

SEQ ID NO: 9662 - DNA, 22 bp, Artificial Sequence
  Description of Artificial Sequence: Synthetic oligonucleotide
cgttcggtcgtgtttatatttg

SEQ ID NO: 9663 - DNA, 21 bp, Artificial Sequence
  Description of Artificial Sequence: Synthetic oligonucleotide
aatcaacttcgtcctcgaaaa

SEQ ID NO: 9664 - DNA, 20 bp, Artificial Sequence
  Description of Artificial Sequence: Synthetic oligonucleotide
cgcccgaaaaataaatacaa

SEQ ID NO: 9665 - DNA, 25 bp, Artificial Sequence
  Description of Artificial Sequence: Synthetic oligonucleotide
gagttttatcgaggttatagtcgtg

SEQ ID NO: 9666 - DNA, 22 bp, Artificial Sequence
  Description of Artificial Sequence: Synthetic oligonucleotide
ttcggtcgtgtttatatttgtt

SEQ ID NO: 9667 - DNA, 19 bp, Artificial Sequence
  Description of Artificial Sequence: Synthetic oligonucleotide
tttagggttttcgaggacg

SEQ ID NO: 9668 - DNA, 20 bp, Artificial Sequence
  Description of Artificial Sequence: Synthetic oligonucleotide
ttttagggttttcgaggacg

SEQ ID NO: 9669 - DNA, 29 bp, Artificial Sequence
  Description of Artificial Sequence: Synthetic oligonucleotide
gttttttgttcgtgacgggcgttttcgag

SEQ ID NO: 9670 - DNA, 21 bp, Artificial Sequence
  Description of Artificial Sequence: Synthetic oligonucleotide
tattctacacgtcaatcccga

SEQ ID NO: 9671 - DNA, 22 bp, Artificial Sequence
  Description of Artificial Sequence: Synthetic oligonucleotide
tctacacgtcaatcccgactac

SEQ ID NO: 9672 - DNA, 19 bp, Artificial Sequence
  Description of Artificial Sequence: Synthetic oligonucleotide
ttagggttttcgaggacga

SEQ ID NO: 9673 - DNA, 23 bp, Artificial Sequence
  Description of Artificial Sequence: Synthetic oligonucleotide
gttcggtcgtgtttatatttgtt

SEQ ID NO: 9674 - DNA, 44 bp, Artificial Sequence
  Description of Artificial Sequence: Synthetic oligonucleotide
ttttcggaggatgatttagtattgaaaagtttcggtcggttttt

SEQ ID NO: 9675 - DNA, 20 bp, Artificial Sequence
  Description of Artificial Sequence: Synthetic oligonucleotide
tagggttttcgaggacgaag

SEQ ID NO: 9676 - DNA, 20 bp, Artificial Sequence
  Description of Artificial Sequence: Synthetic oligonucleotide
cgaggacgaagttgattttg

SEQ ID NO: 9677 - DNA, 22 bp, Artificial Sequence
  Description of Artificial Sequence: Synthetic oligonucleotide
tagtttattttgcggtcgttta

SEQ ID NO: 9678 - DNA, 35 bp, Artificial Sequence
  Description of Artificial Sequence: Synthetic oligonucleotide
ggaggtcgttggtattcgtgatttacgattttttt

SEQ ID NO: 9679 - DNA, 21 bp, Artificial Sequence
  Description of Artificial Sequence: Synthetic oligonucleotide
ttattctacacgtcaatcccg

SEQ ID NO: 9680 - DNA, 19 bp, Artificial Sequence
  Description of Artificial Sequence: Synthetic oligonucleotide
agtcgtcgtttcggatttt

SEQ ID NO: 9681 - DNA, 31 bp, Artificial Sequence
  Description of Artificial Sequence: Synthetic oligonucleotide
tgttcgtcggttcgtagattttgtatcgggt

SEQ ID NO: 9682 - DNA, 22 bp, Artificial Sequence
  Description of Artificial Sequence: Synthetic oligonucleotide
gatacaaaatctacgaaccgac

SEQ ID NO: 9683 - DNA, 22 bp, Artificial Sequence
  Description of Artificial Sequence: Synthetic oligonucleotide
gagcgcgttgtatttatttttc

SEQ ID NO: 9684 - DNA, 19 bp, Artificial Sequence
  Description of Artificial Sequence: Synthetic oligonucleotide
gacgtacccacccgttaat

SEQ ID NO: 9685 - DNA, 37 bp, Artificial Sequence
  Description of Artificial Sequence: Synthetic oligonucleotide
ttcggtcgggtttaaacgttttaatcgttagcggcgg

SEQ ID NO: 9686 - DNA, 20 bp, Artificial Sequence
  Description of Artificial Sequence: Synthetic oligonucleotide
gttgattttgatcgggtcgt

SEQ ID NO: 9687 - DNA, 20 bp, Artificial Sequence
  Description of Artificial Sequence: Synthetic oligonucleotide
aatcaacttcgtcctcgaaa

SEQ ID NO: 9688 - DNA, 21 bp, Artificial Sequence
  Description of Artificial Sequence: Synthetic oligonucleotide
gcgttcggtcgtgtttatatt

SEQ ID NO: 9689 - DNA, 39 bp, Artificial Sequence
  Description of Artificial Sequence: Synthetic oligonucleotide
tgatttagtattgaaaagtttcggtcggtttttttaggg

SEQ ID NO: 9690 - DNA, 22 bp, Artificial Sequence
  Description of Artificial Sequence: Synthetic oligonucleotide
tattctacacgtcaatcccgac

SEQ ID NO: 9691 - DNA, 20 bp, Artificial Sequence
  Description of Artificial Sequence: Synthetic oligonucleotide
tcgaggacgaagttgatttt

SEQ ID NO: 9692 - DNA, 20 bp, Artificial Sequence
  Description of Artificial Sequence: Synthetic oligonucleotide
tacgaatccaaacccgatac

SEQ ID NO: 9693 - DNA, 23 bp, Artificial Sequence
  Description of Artificial Sequence: Synthetic oligonucleotide
ccacgactataacctcgataaaa

SEQ ID NO: 9694 - DNA, 23 bp, Artificial Sequence
  Description of Artificial Sequence: Synthetic oligonucleotide
gaggttatagtcgtggtttcgtt

SEQ ID NO: 9695 - DNA, 21 bp, Artificial Sequence
  Description of Artificial Sequence: Synthetic oligonucleotide
aaatctacgaaccgacgaaca

SEQ ID NO: 9696 - DNA, 28 bp, Artificial Sequence
  Description of Artificial Sequence: Synthetic oligonucleotide
ggaattcgcgtttgagtcgtcgtttcgg

SEQ ID NO: 9697 - DNA, 21 bp, Artificial Sequence
  Description of Artificial Sequence: Synthetic oligonucleotide
acaaaatctacgaaccgacga

SEQ ID NO: 9698 - DNA, 19 bp, Artificial Sequence
  Description of Artificial Sequence: Synthetic oligonucleotide
tgattttgatcgggtcgtt

SEQ ID NO: 9699 - DNA, 19 bp, Artificial Sequence
  Description of Artificial Sequence: Synthetic oligonucleotide
ttgattttgatcgggtcgt

SEQ ID NO: 9700 - DNA, 21 bp, Artificial Sequence
  Description of Artificial Sequence: Synthetic oligonucleotide
aatctacgaaccgacgaacac

SEQ ID NO: 9701 - DNA, 21 bp, Artificial Sequence
  Description of Artificial Sequence: Synthetic oligonucleotide
ataaatacaacgcgctcatta

SEQ ID NO: 9702 - DNA, 22 bp, Artificial Sequence
  Description of Artificial Sequence: Synthetic oligonucleotide
gtcggaatataaggaaggatcg

SEQ ID NO: 9703 - DNA, 24 bp, Artificial Sequence
  Description of Artificial Sequence: Synthetic oligonucleotide
ccgtaaacatacccaactactacg

SEQ ID NO: 9704 - DNA, 25 bp, Artificial Sequence
  Description of Artificial Sequence: Synthetic oligonucleotide
ttcgcggatttagggttggcggcgg

SEQ ID NO: 9705 - DNA, 22 bp, Artificial Sequence
  Description of Artificial Sequence: Synthetic oligonucleotide
ggtcgtgtttatatttgttcgt

SEQ ID NO: 9706 - DNA, 21 bp, Artificial Sequence
  Description of Artificial Sequence: Synthetic oligonucleotide
ccgatacaaaatctacgaacc

SEQ ID NO: 9707 - DNA, 19 bp, Artificial Sequence
  Description of Artificial Sequence: Synthetic oligonucleotide
gtatgtttacggagggcga

SEQ ID NO: 9708 - DNA, 22 bp, Artificial Sequence
  Description of Artificial Sequence: Synthetic oligonucleotide
cgacgcgactaataaataacct

SEQ ID NO: 9709 - DNA, 34 bp, Artificial Sequence
  Description of Artificial Sequence: Synthetic oligonucleotide
gatgtcggtgggtatggatacgtttatttatcgt

SEQ ID NO: 9710 - DNA, 20 bp, Artificial Sequence
  Description of Artificial Sequence: Synthetic oligonucleotide
tatgtttacggagggcgagt

SEQ ID NO: 9711 - DNA, 20 bp, Artificial Sequence
  Description of Artificial Sequence: Synthetic oligonucleotide
ggttttcgaggacgaagttg

SEQ ID NO: 9712 - DNA, 20 bp, Artificial Sequence
  Description of Artificial Sequence: Synthetic oligonucleotide
atcaacttcgtcctcgaaaa

SEQ ID NO: 9713 - DNA, 22 bp, Artificial Sequence
  Description of Artificial Sequence: Synthetic oligonucleotide
ttctacacgtcaatcccgacta

SEQ ID NO: 9714 - DNA, 20 bp, Artificial Sequence
  Description of Artificial Sequence: Synthetic oligonucleotide
ccgcccgaaaaataaataca

SEQ ID NO: 9715 - DNA, 24 bp, Artificial Sequence
  Description of Artificial Sequence: Synthetic oligonucleotide
agttttatcgaggttatagtcgtg

SEQ ID NO: 9716 - DNA, 20 bp, Artificial Sequence
  Description of Artificial Sequence: Synthetic oligonucleotide
caaaatctacgaaccgacga

SEQ ID NO: 9717 - DNA, 22 bp, Artificial Sequence
  Description of Artificial Sequence: Synthetic oligonucleotide
cgattattctacacgtcaatcc

SEQ ID NO: 9718 - DNA, 22 bp, Artificial Sequence
  Description of Artificial Sequence: Synthetic oligonucleotide
acgacgcgactaataaataacc

SEQ ID NO: 9719 - DNA, 21 bp, Artificial Sequence
  Description of Artificial Sequence: Synthetic oligonucleotide
tcggaatataaggaaggatcg

SEQ ID NO: 9720 - DNA, 20 bp, Artificial Sequence
  Description of Artificial Sequence: Synthetic oligonucleotide
gagtcgtcgtttcggatttt

SEQ ID NO: 9721 - DNA, 20 bp, Artificial Sequence
  Description of Artificial Sequence: Synthetic oligonucleotide
atctacgaaccgacgaacac

SEQ ID NO: 9722 - DNA, 23 bp, Artificial Sequence
  Description of Artificial Sequence: Synthetic oligonucleotide
gtttagtttattttgcggtcgtt

SEQ ID NO: 9723 - DNA, 21 bp, Artificial Sequence
  Description of Artificial Sequence: Synthetic oligonucleotide
taacacccgtaacctacgacc

SEQ ID NO: 9724 - DNA, 22 bp, Artificial Sequence
  Description of Artificial Sequence: Synthetic oligonucleotide
tatagcgcgtttattggttttc

SEQ ID NO: 9725 - DNA, 28 bp, Artificial Sequence
  Description of Artificial Sequence: Synthetic oligonucleotide
gacgaggttacggttgtgatttcggtgg

SEQ ID NO: 9726 - DNA, 21 bp, Artificial Sequence
  Description of Artificial Sequence: Synthetic oligonucleotide
atccccgaaaacgaaattaac

SEQ ID NO: 9727 - DNA, 22 bp, Artificial Sequence
  Description of Artificial Sequence: Synthetic oligonucleotide
ggtttagacgcgagttttagtg

SEQ ID NO: 9728 - DNA, 32 bp, Artificial Sequence
  Description of Artificial Sequence: Synthetic oligonucleotide
gattcgggttttagaattgggagacggttcgg

SEQ ID NO: 9729 - DNA, 22 bp, Artificial Sequence
  Description of Artificial Sequence: Synthetic oligonucleotide
aataacacgatctcgactcacc

SEQ ID NO: 9730 - DNA, 23 bp, Artificial Sequence
  Description of Artificial Sequence: Synthetic oligonucleotide
cgttcggttaatttttgtatttt

SEQ ID NO: 9731 - DNA, 29 bp, Artificial Sequence
  Description of Artificial Sequence: Synthetic oligonucleotide
tgagggaggagaatcgtttgaattcggga

SEQ ID NO: 9732 - DNA, 20 bp, Artificial Sequence
  Description of Artificial Sequence: Synthetic oligonucleotide
aatccccgaaaacgaaatta

SEQ ID NO: 9733 - DNA, 21 bp, Artificial Sequence
  Description of Artificial Sequence: Synthetic oligonucleotide
ttaacacccgtaacctacgac

SEQ ID NO: 9734 - DNA, 24 bp, Artificial Sequence
  Description of Artificial Sequence: Synthetic oligonucleotide
acgttcggttaatttttgtatttt

SEQ ID NO: 9735 - DNA, 20 bp, Artificial Sequence
  Description of Artificial Sequence: Synthetic oligonucleotide
cgaaatcacaaccgtaacct

SEQ ID NO: 9736 - DNA, 23 bp, Artificial Sequence
  Description of Artificial Sequence: Synthetic oligonucleotide
gttcgttacgggtagggggcggg

SEQ ID NO: 9737 - DNA, 21 bp, Artificial Sequence
  Description of Artificial Sequence: Synthetic oligonucleotide
aaatccccgaaaacgaaatta

SEQ ID NO: 9738 - DNA, 22 bp, Artificial Sequence
  Description of Artificial Sequence: Synthetic oligonucleotide
cgtttactcctaaaacaaacga

SEQ ID NO: 9739 - DNA, 21 bp, Artificial Sequence
  Description of Artificial Sequence: Synthetic oligonucleotide
tattttataggtcgggttcgc

SEQ ID NO: 9740 - DNA, 26 bp, Artificial Sequence
  Description of Artificial Sequence: Synthetic oligonucleotide
ttcgttgggggcgttttcggcgacgt

SEQ ID NO: 9741 - DNA, 20 bp, Artificial Sequence
  Description of Artificial Sequence: Synthetic oligonucleotide
cgacgaccaccttaaaaatc

SEQ ID NO: 9742 - DNA, 22 bp, Artificial Sequence
  Description of Artificial Sequence: Synthetic oligonucleotide
cgcggttaatagtttcgtttag

SEQ ID NO: 9743 - DNA, 31 bp, Artificial Sequence
  Description of Artificial Sequence: Synthetic oligonucleotide
ttcgcgagggttcgtattgggcgtttttcga

SEQ ID NO: 9744 - DNA, 20 bp, Artificial Sequence
  Description of Artificial Sequence: Synthetic oligonucleotide
gacgaccaccttaaaaatcg

SEQ ID NO: 9745 - DNA, 23 bp, Artificial Sequence
  Description of Artificial Sequence: Synthetic oligonucleotide
acgtttactcctaaaacaaacga

SEQ ID NO: 9746 - DNA, 22 bp, Artificial Sequence
  Description of Artificial Sequence: Synthetic oligonucleotide
caataacacgatctcgactcac

SEQ ID NO: 9747 - DNA, 22 bp, Artificial Sequence
  Description of Artificial Sequence: Synthetic oligonucleotide
acaataacacgatctcgactca

SEQ ID NO: 9748 - DNA, 20 bp, Artificial Sequence
  Description of Artificial Sequence: Synthetic oligonucleotide
ccgacgaccaccttaaaaat

SEQ ID NO: 9749 - DNA, 20 bp, Artificial Sequence
  Description of Artificial Sequence: Synthetic oligonucleotide
tccccgaaaacgaaattaac

SEQ ID NO: 9750 - DNA, 22 bp, Artificial Sequence
  Description of Artificial Sequence: Synthetic oligonucleotide
cgaacccgacctataaaataaa

SEQ ID NO: 9751 - DNA, 20 bp, Artificial Sequence
  Description of Artificial Sequence: Synthetic oligonucleotide
taatttcgttttcggggatt

SEQ ID NO: 9752 - DNA, 38 bp, Artificial Sequence
  Description of Artificial Sequence: Synthetic oligonucleotide
ttcggggattttaggtttacggataagtatgaatacgg

SEQ ID NO: 9753 - DNA, 21 bp, Artificial Sequence
  Description of Artificial Sequence: Synthetic oligonucleotide
atagcgcgtttattggttttc

SEQ ID NO: 9754 - DNA, 20 bp, Artificial Sequence
  Description of Artificial Sequence: Synthetic oligonucleotide
aacacccgtaacctacgacc

SEQ ID NO: 9755 - DNA, 19 bp, Artificial Sequence
  Description of Artificial Sequence: Synthetic oligonucleotide
cgaccaccttaaaaatcgc

SEQ ID NO: 9756 - DNA, 19 bp, Artificial Sequence
  Description of Artificial Sequence: Synthetic oligonucleotide
caccgaaatcacaaccgta

SEQ ID NO: 9757 - DNA, 21 bp, Artificial Sequence
  Description of Artificial Sequence: Synthetic oligonucleotide
ttattggttttcggagacgtt

SEQ ID NO: 9758 - DNA, 23 bp, Artificial Sequence
  Description of Artificial Sequence: Synthetic oligonucleotide
gaacccgacctataaaataaacg

SEQ ID NO: 9759 - DNA, 19 bp, Artificial Sequence
  Description of Artificial Sequence: Synthetic oligonucleotide
caaccgtaacctcgtctcc

SEQ ID NO: 9760 - DNA, 22 bp, Artificial Sequence
  Description of Artificial Sequence: Synthetic oligonucleotide
gcggttaatagtttcgtttagg

SEQ ID NO: 9761 - DNA, 22 bp, Artificial Sequence
  Description of Artificial Sequence: Synthetic oligonucleotide
tcgcggttaatagtttcgttta

SEQ ID NO: 9762 - DNA, 25 bp, Artificial Sequence
  Description of Artificial Sequence: Synthetic oligonucleotide
tacgttcggttaatttttgtatttt

SEQ ID NO: 9763 - DNA, 25 bp, Artificial Sequence
  Description of Artificial Sequence: Synthetic oligonucleotide
ttacgttcggttaatttttgtattt

SEQ ID NO: 9764 - DNA, 23 bp, Artificial Sequence
  Description of Artificial Sequence: Synthetic oligonucleotide
ttattacgttcggttaatttttg

SEQ ID NO: 9765 - DNA, 22 bp, Artificial Sequence
  Description of Artificial Sequence: Synthetic oligonucleotide
cggttaatagtttcgtttaggg

SEQ ID NO: 9766 - DNA, 20 bp, Artificial Sequence
  Description of Artificial Sequence: Synthetic oligonucleotide
attttataggtcgggttcgc

SEQ ID NO: 9767 - DNA, 22 bp, Artificial Sequence
  Description of Artificial Sequence: Synthetic oligonucleotide
tttattggttttcggagacgtt

SEQ ID NO: 9768 - DNA, 22 bp, Artificial Sequence
  Description of Artificial Sequence: Synthetic oligonucleotide
tcaaaactaacgacgaaactcc

SEQ ID NO: 9769 - DNA, 20 bp, Artificial Sequence
  Description of Artificial Sequence: Synthetic oligonucleotide
atgatttcggtggagtcgat

SEQ ID NO: 9770 - DNA, 34 bp, Artificial Sequence
  Description of Artificial Sequence: Synthetic oligonucleotide
ttcgtttttcgtgaatatgtttagttgttgcggg

SEQ ID NO: 9771 - DNA, 22 bp, Artificial Sequence
  Description of Artificial Sequence: Synthetic oligonucleotide
gcgaacccgacctataaaataa

SEQ ID NO: 9772 - DNA, 19 bp, Artificial Sequence
  Description of Artificial Sequence: Synthetic oligonucleotide
gaaacctacgacctacgcc

SEQ ID NO: 9773 - DNA, 22 bp, Artificial Sequence
  Description of Artificial Sequence: Synthetic oligonucleotide
gtttcgagtgtttttagcgttc

SEQ ID NO: 9774 - DNA, 24 bp, Artificial Sequence
  Description of Artificial Sequence: Synthetic oligonucleotide
ttacggggttttcggcggtcgagg

SEQ ID NO: 9775 - DNA, 20 bp, Artificial Sequence
  Description of Artificial Sequence: Synthetic oligonucleotide
tagcgcgtttattggttttc

SEQ ID NO: 9776 - DNA, 22 bp, Artificial Sequence
  Description of Artificial Sequence: Synthetic oligonucleotide
aacccgacctataaaataaacg

SEQ ID NO: 9777 - DNA, 20 bp, Artificial Sequence
  Description of Artificial Sequence: Synthetic oligonucleotide
aaatcacaaccgtaacctcg

SEQ ID NO: 9778 - DNA, 21 bp, Artificial Sequence
  Description of Artificial Sequence: Synthetic oligonucleotide
gtttattggttttcggagacg

SEQ ID NO: 9779 - DNA, 23 bp, Artificial Sequence
  Description of Artificial Sequence: Synthetic oligonucleotide
ttcgttacgggtagggggcggga

SEQ ID NO: 9780 - DNA, 19 bp, Artificial Sequence
  Description of Artificial Sequence: Synthetic oligonucleotide
aatttcgttttcggggatt

SEQ ID NO: 9781 - DNA, 20 bp, Artificial Sequence
  Description of Artificial Sequence: Synthetic oligonucleotide
acgaccaccttaaaaatcgc

SEQ ID NO: 9782 - DNA, 19 bp, Artificial Sequence
  Description of Artificial Sequence: Synthetic oligonucleotide
acacccgtaacctacgacc

SEQ ID NO: 9783 - DNA, 22 bp, Artificial Sequence
  Description of Artificial Sequence: Synthetic oligonucleotide
cggtttagacgcgagttttagt

SEQ ID NO: 9784 - DNA, 21 bp, Artificial Sequence
  Description of Artificial Sequence: Synthetic oligonucleotide
gaaatcacaaccgtaacctcg

SEQ ID NO: 9785 - DNA, 25 bp, Artificial Sequence
  Description of Artificial Sequence: Synthetic oligonucleotide
ttacgggtagggggcgggaagtagg

SEQ ID NO: 9786 - DNA, 21 bp, Artificial Sequence
  Description of Artificial Sequence: Synthetic oligonucleotide
gtcgcggttaatagtttcgtt

SEQ ID NO: 9787 - DNA, 22 bp, Artificial Sequence
  Description of Artificial Sequence: Synthetic oligonucleotide
aaaactaacgacgaaactccaa

SEQ ID NO: 9788 - DNA, 18 bp, Artificial Sequence
  Description of Artificial Sequence: Synthetic oligonucleotide
cggtggatgaacgtgttt

SEQ ID NO: 9789 - DNA, 18 bp, Artificial Sequence
  Description of Artificial Sequence: Synthetic oligonucleotide
aaaatccccgaaaacgaa

SEQ ID NO: 9790 - DNA, 20 bp, Artificial Sequence
  Description of Artificial Sequence: Synthetic oligonucleotide
gcgaacccgacctataaaat

SEQ ID NO: 9791 - DNA, 21 bp, Artificial Sequence
  Description of Artificial Sequence: Synthetic oligonucleotide
gttaatttcgttttcggggat

SEQ ID NO: 9792 - DNA, 19 bp, Artificial Sequence
  Description of Artificial Sequence: Synthetic oligonucleotide
cgtaacctacgaccccctt

SEQ ID NO: 9793 - DNA, 22 bp, Artificial Sequence
  Description of Artificial Sequence: Synthetic oligonucleotide
tttcgtttcgagtgtttttagc

SEQ ID NO: 9794 - DNA, 22 bp, Artificial Sequence
  Description of Artificial Sequence: Synthetic oligonucleotide
gtttttcgtcgcggttaatagt

SEQ ID NO: 9795 - DNA, 26 bp, Artificial Sequence
  Description of Artificial Sequence: Synthetic oligonucleotide
attacgttcggttaatttttgtattt

SEQ ID NO: 9796 - DNA, 19 bp, Artificial Sequence
  Description of Artificial Sequence: Synthetic oligonucleotide
aaccgtaacctcgtctccc

SEQ ID NO: 9797 - DNA, 22 bp, Artificial Sequence
  Description of Artificial Sequence: Synthetic oligonucleotide
ccgcgaccttaaataaactaaa

SEQ ID NO: 9798 - DNA, 18 bp, Artificial Sequence
  Description of Artificial Sequence: Synthetic oligonucleotide
ggtcgtaggtttcgggtc

SEQ ID NO: 9799 - DNA, 25 bp, Artificial Sequence
  Description of Artificial Sequence: Synthetic oligonucleotide
gtcgtcgcgcgtgtggaggaggcgg

SEQ ID NO: 9800 - DNA, 19 bp, Artificial Sequence
  Description of Artificial Sequence: Synthetic oligonucleotide
tatatccacccctcgaacg

SEQ ID NO: 9801 - DNA, 21 bp, Artificial Sequence
  Description of Artificial Sequence: Synthetic oligonucleotide
acgtgtttattcgttggttga

SEQ ID NO: 9802 - DNA, 32 bp, Artificial Sequence
  Description of Artificial Sequence: Synthetic oligonucleotide
gacgattggagcgtttggattcggtcgggcgt

SEQ ID NO: 9803 - DNA, 19 bp, Artificial Sequence
  Description of Artificial Sequence: Synthetic oligonucleotide
gatttcggtggagtcgatg

SEQ ID NO: 9804 - DNA, 19 bp, Artificial Sequence
  Description of Artificial Sequence: Synthetic oligonucleotide
tgatttcggtggagtcgat

SEQ ID NO: 9805 - DNA, 20 bp, Artificial Sequence
  Description of Artificial Sequence: Synthetic oligonucleotide
ctatatccacccctcgaacg

SEQ ID NO: 9806 - DNA, 23 bp, Artificial Sequence
  Description of Artificial Sequence: Synthetic oligonucleotide
cgaacccgacctataaaataaac

SEQ ID NO: 9807 - DNA, 19 bp, Artificial Sequence
  Description of Artificial Sequence: Synthetic oligonucleotide
atttcgttttcggggattt

SEQ ID NO: 9808 - DNA, 20 bp, Artificial Sequence
  Description of Artificial Sequence: Synthetic oligonucleotide
ttaatttcgttttcggggat

SEQ ID NO: 9809 - DNA, 21 bp, Artificial Sequence
  Description of Artificial Sequence: Synthetic oligonucleotide
tttcgtcgcggttaatagttt

SEQ ID NO: 9810 - DNA, 21 bp, Artificial Sequence
  Description of Artificial Sequence: Synthetic oligonucleotide
tttttcgtcgcggttaatagt

SEQ ID NO: 9811 - DNA, 21 bp, Artificial Sequence
  Description of Artificial Sequence: Synthetic oligonucleotide
ttttcgtcgcggttaatagtt

SEQ ID NO: 9812 - DNA, 20 bp, Artificial Sequence
  Description of Artificial Sequence: Synthetic oligonucleotide
ccgaatcccactaaaactcg

SEQ ID NO: 9813 - DNA, 21 bp, Artificial Sequence
  Description of Artificial Sequence: Synthetic oligonucleotide
tatacgttagtttcggttgcg

SEQ ID NO: 9814 - DNA, 21 bp, Artificial Sequence
  Description of Artificial Sequence: Synthetic oligonucleotide
atcgggggttcgggacggcgg

SEQ ID NO: 9815 - DNA, 21 bp, Artificial Sequence
  Description of Artificial Sequence: Synthetic oligonucleotide
ataacacgatctcgactcacc

SEQ ID NO: 9816 - DNA, 20 bp, Artificial Sequence
  Description of Artificial Sequence: Synthetic oligonucleotide
tattggttttcggagacgtt

SEQ ID NO: 9817 - DNA, 20 bp, Artificial Sequence
  Description of Artificial Sequence: Synthetic oligonucleotide
tttattggttttcggagacg

SEQ ID NO: 9818 - DNA, 18 bp, Artificial Sequence
  Description of Artificial Sequence: Synthetic oligonucleotide
gatctcgactcaccgcaa

SEQ ID NO: 9819 - DNA, 22 bp, Artificial Sequence
  Description of Artificial Sequence: Synthetic oligonucleotide
gagattataggcgtgcgttatt

SEQ ID NO: 9820 - DNA, 20 bp, Artificial Sequence
  Description of Artificial Sequence: Synthetic oligonucleotide
tcgtcgcggttaatagtttc

SEQ ID NO: 9821 - DNA, 21 bp, Artificial Sequence
  Description of Artificial Sequence: Synthetic oligonucleotide
aaatcacaaccgtaacctcgt

SEQ ID NO: 9822 - DNA, 20 bp, Artificial Sequence
  Description of Artificial Sequence: Synthetic oligonucleotide
cgttcgaggggtggatatag

SEQ ID NO: 9823 - DNA, 20 bp, Artificial Sequence
  Description of Artificial Sequence: Synthetic oligonucleotide
actcgaaaaacgcccaatac

SEQ ID NO: 9824 - DNA, 27 bp, Artificial Sequence
  Description of Artificial Sequence: Synthetic oligonucleotide
gtttagggttggtcgttgttcggcgtt

SEQ ID NO: 9825 - DNA, 18 bp, Artificial Sequence
  Description of Artificial Sequence: Synthetic oligonucleotide
accgtaacctcgtctccc

SEQ ID NO: 9826 - DNA, 19 bp, Artificial Sequence
  Description of Artificial Sequence: Synthetic oligonucleotide
ttttataggtcgggttcgc

SEQ ID NO: 9827 - DNA, 20 bp, Artificial Sequence
  Description of Artificial Sequence: Synthetic oligonucleotide
actattaaccgcgacgaaaa

SEQ ID NO: 9828 - DNA, 23 bp, Artificial Sequence
  Description of Artificial Sequence: Synthetic oligonucleotide
cggttttatcgtttgttttagga

SEQ ID NO: 9829 - DNA, 21 bp, Artificial Sequence
  Description of Artificial Sequence: Synthetic oligonucleotide
gggcgagcgttcggggggttg

SEQ ID NO: 9830 - DNA, 19 bp, Artificial Sequence
  Description of Artificial Sequence: Synthetic oligonucleotide
agcgcgtttattggttttc

SEQ ID NO: 9831 - DNA, 21 bp, Artificial Sequence
  Description of Artificial Sequence: Synthetic oligonucleotide
atcacaaccgtaacctcgtct

SEQ ID NO: 9832 - DNA, 22 bp, Artificial Sequence
  Description of Artificial Sequence: Synthetic oligonucleotide
gaacgctaaaaacactcgaaac

SEQ ID NO: 9833 - DNA, 18 bp, Artificial Sequence
  Description of Artificial Sequence: Synthetic oligonucleotide
ttttaaggtggtcgtcgg

SEQ ID NO: 9834 - DNA, 27 bp, Artificial Sequence
  Description of Artificial Sequence: Synthetic oligonucleotide
ttcgtaaacgtttgttcgagcgcgcgt

SEQ ID NO: 9835 - DNA, 22 bp, Artificial Sequence
  Description of Artificial Sequence: Synthetic oligonucleotide
aactaacgacgaaactccaaaa

SEQ ID NO: 9836 - DNA, 17 bp, Artificial Sequence
  Description of Artificial Sequence: Synthetic oligonucleotide
gagtcgatgcggtggat

SEQ ID NO: 9837 - DNA, 22 bp, Artificial Sequence
  Description of Artificial Sequence: Synthetic oligonucleotide
aaactaacgacgaaactccaaa

SEQ ID NO: 9838 - DNA, 21 bp, Artificial Sequence
  Description of Artificial Sequence: Synthetic oligonucleotide
ttcgtcgcggttaatagtttc

SEQ ID NO: 9839 - DNA, 22 bp, Artificial Sequence
  Description of Artificial Sequence: Synthetic oligonucleotide
gaactcaaaactaacgacgaaa

SEQ ID NO: 9840 - DNA, 24 bp, Artificial Sequence
  Description of Artificial Sequence: Synthetic oligonucleotide
tattacgttcggttaatttttgta

SEQ ID NO: 9841 - DNA, 23 bp, Artificial Sequence
  Description of Artificial Sequence: Synthetic oligonucleotide
tacaataacacgatctcgactca

SEQ ID NO: 9842 - DNA, 20 bp, Artificial Sequence
  Description of Artificial Sequence: Synthetic oligonucleotide
acaaccgtaacctcgtctcc

SEQ ID NO: 9843 - DNA, 20 bp, Artificial Sequence
  Description of Artificial Sequence: Synthetic oligonucleotide
gcgtttattggttttcggag

SEQ ID NO: 9844 - DNA, 18 bp, Artificial Sequence
  Description of Artificial Sequence: Synthetic oligonucleotide
acccgtaacctacgaccc

SEQ ID NO: 9845 - DNA, 21 bp, Artificial Sequence
  Description of Artificial Sequence: Synthetic oligonucleotide
cgaactcaaaactaacgacga

SEQ ID NO: 9846 - DNA, 18 bp, Artificial Sequence
  Description of Artificial Sequence: Synthetic oligonucleotide
tttcgttttcggggattt

SEQ ID NO: 9847 - DNA, 21 bp, Artificial Sequence
  Description of Artificial Sequence: Synthetic oligonucleotide
agtgtttttagcgttcggttc

SEQ ID NO: 9848 - DNA, 21 bp, Artificial Sequence
  Description of Artificial Sequence: Synthetic oligonucleotide
gagtgtttttagcgttcggtt

SEQ ID NO: 9849 - DNA, 22 bp, Artificial Sequence
  Description of Artificial Sequence: Synthetic oligonucleotide
tgagattataggcgtgcgttat

SEQ ID NO: 9850 - DNA, 17 bp, Artificial Sequence
  Description of Artificial Sequence: Synthetic oligonucleotide
ttaaggtggtcgtcggg

SEQ ID NO: 9851 - DNA, 18 bp, Artificial Sequence
  Description of Artificial Sequence: Synthetic oligonucleotide
atctcgactcaccgcaac

SEQ ID NO: 9852 - DNA, 22 bp, Artificial Sequence
  Description of Artificial Sequence: Synthetic oligonucleotide
gacgtgtttattcgttggttga

SEQ ID NO: 9853 - DNA, 22 bp, Artificial Sequence
  Description of Artificial Sequence: Synthetic oligonucleotide
aatcacaaccgtaacctcgtct

SEQ ID NO: 9854 - DNA, 18 bp, Artificial Sequence
  Description of Artificial Sequence: Synthetic oligonucleotide
atatccacccctcgaacg

SEQ ID NO: 9855 - DNA, 19 bp, Artificial Sequence
  Description of Artificial Sequence: Synthetic oligonucleotide
gcgaacccgacctataaaa

SEQ ID NO: 9856 - DNA, 20 bp, Artificial Sequence
  Description of Artificial Sequence: Synthetic oligonucleotide
agggttaatttcgttttcgg

SEQ ID NO: 9857 - DNA, 22 bp, Artificial Sequence
  Description of Artificial Sequence: Synthetic oligonucleotide
ctcaaaactaacgacgaaactc

SEQ ID NO: 9858 - DNA, 21 bp, Artificial Sequence
  Description of Artificial Sequence: Synthetic oligonucleotide
tttcgagtgtttttagcgttc

SEQ ID NO: 9859 - DNA, 21 bp, Artificial Sequence
  Description of Artificial Sequence: Synthetic oligonucleotide
ttcgtttcgagtgtttttagc

SEQ ID NO: 9860 - DNA, 22 bp, Artificial Sequence
  Description of Artificial Sequence: Synthetic oligonucleotide
actaacgacgaaactccaaaac

SEQ ID NO: 9861 - DNA, 18 bp, Artificial Sequence
  Description of Artificial Sequence: Synthetic oligonucleotide
cgcggttggtagatgatt

SEQ ID NO: 9862 - DNA, 23 bp, Artificial Sequence
  Description of Artificial Sequence: Synthetic oligonucleotide
accgcgaccttaaataaactaaa

SEQ ID NO: 9863 - DNA, 18 bp, Artificial Sequence
  Description of Artificial Sequence: Synthetic oligonucleotide
cgaaccgtctcccaattc

SEQ ID NO: 9864 - DNA, 22 bp, Artificial Sequence
  Description of Artificial Sequence: Synthetic oligonucleotide
gttagtttcggttgcgagttta

SEQ ID NO: 9865 - DNA, 23 bp, Artificial Sequence
  Description of Artificial Sequence: Synthetic oligonucleotide
actcaaaactaacgacgaaactc

SEQ ID NO: 9866 - DNA, 18 bp, Artificial Sequence
  Description of Artificial Sequence: Synthetic oligonucleotide
atttcggtggagtcgatg

SEQ ID NO: 9867 - DNA, 20 bp, Artificial Sequence
  Description of Artificial Sequence: Synthetic oligonucleotide
ttttcgtcgcggttaatagt

SEQ ID NO: 9868 - DNA, 20 bp, Artificial Sequence
  Description of Artificial Sequence: Synthetic oligonucleotide
cgaggacgacgtgtttattc

SEQ ID NO: 9869 - DNA, 20 bp, Artificial Sequence
  Description of Artificial Sequence: Synthetic oligonucleotide
gaggacgacgtgtttattcg

SEQ ID NO: 9870 - DNA, 18 bp, Artificial Sequence
  Description of Artificial Sequence: Synthetic oligonucleotide
tttaaggtggtcgtcggg

SEQ ID NO: 9871 - DNA, 20 bp, Artificial Sequence
  Description of Artificial Sequence: Synthetic oligonucleotide
tcacaaccgtaacctcgtct

SEQ ID NO: 9872 - DNA, 22 bp, Artificial Sequence
  Description of Artificial Sequence: Synthetic oligonucleotide
tagtttcggttgcgagtttaag

SEQ ID NO: 9873 - DNA, 17 bp, Artificial Sequence
  Description of Artificial Sequence: Synthetic oligonucleotide
gaaacccgacaccttcg

SEQ ID NO: 9874 - DNA, 29 bp, Artificial Sequence
  Description of Artificial Sequence: Synthetic oligonucleotide
tacggggttttcggcggtcgaggcggcgt

SEQ ID NO: 9875 - DNA, 24 bp, Artificial Sequence
  Description of Artificial Sequence: Synthetic oligonucleotide
atacaataacacgatctcgactca

SEQ ID NO: 9876 - DNA, 20 bp, Artificial Sequence
  Description of Artificial Sequence: Synthetic oligonucleotide
atacgttagtttcggttgcg

SEQ ID NO: 9877 - DNA, 19 bp, Artificial Sequence
  Description of Artificial Sequence: Synthetic oligonucleotide
gatgatttcggtggagtcg

SEQ ID NO: 9878 - DNA, 19 bp, Artificial Sequence
  Description of Artificial Sequence: Synthetic oligonucleotide
ccccgaaaacgaaattaac

SEQ ID NO: 9879 - DNA, 21 bp, Artificial Sequence
  Description of Artificial Sequence: Synthetic oligonucleotide
caaaactaacgacgaaactcc

SEQ ID NO: 9880 - DNA, 18 bp, Artificial Sequence
  Description of Artificial Sequence: Synthetic oligonucleotide
cgtttggtttcgttcgag

SEQ ID NO: 9881 - DNA, 19 bp, Artificial Sequence
  Description of Artificial Sequence: Synthetic oligonucleotide
attggttttcggagacgtt

SEQ ID NO: 9882 - DNA, 22 bp, Artificial Sequence
  Description of Artificial Sequence: Synthetic oligonucleotide
cgcgttgtttaggtagttttgt

SEQ ID NO: 9883 - DNA, 20 bp, Artificial Sequence
  Description of Artificial Sequence: Synthetic oligonucleotide
ctactaactccacgtcccga

SEQ ID NO: 9884 - DNA, 21 bp, Artificial Sequence
  Description of Artificial Sequence: Synthetic oligonucleotide
tggtcgtcggcgtgggcgatg

SEQ ID NO: 9885 - DNA, 20 bp, Artificial Sequence
  Description of Artificial Sequence: Synthetic oligonucleotide
tactaactccacgtcccgaa

SEQ ID NO: 9886 - DNA, 21 bp, Artificial Sequence
  Description of Artificial Sequence: Synthetic oligonucleotide
gttaggtagtttggtcgtcgg

SEQ ID NO: 9887 - DNA, 21 bp, Artificial Sequence
  Description of Artificial Sequence: Synthetic oligonucleotide
ttaccgtcgtttttcaaatca

SEQ ID NO: 9888 - DNA, 23 bp, Artificial Sequence
  Description of Artificial Sequence: Synthetic oligonucleotide
ggggcgttttcgggacgtggagt

SEQ ID NO: 9889 - DNA, 22 bp, Artificial Sequence
  Description of Artificial Sequence: Synthetic oligonucleotide
tttaccgtcgtttttcaaatca

SEQ ID NO: 9890 - DNA, 20 bp, Artificial Sequence
  Description of Artificial Sequence: Synthetic oligonucleotide
ttaggtagtttggtcgtcgg

SEQ ID NO: 9891 - DNA, 22 bp, Artificial Sequence
  Description of Artificial Sequence: Synthetic oligonucleotide
cgttgtttaggtagttttgtcg

SEQ ID NO: 9892 - DNA, 21 bp, Artificial Sequence
  Description of Artificial Sequence: Synthetic oligonucleotide
ctactaactccacgtcccgaa

SEQ ID NO: 9893 - DNA, 19 bp, Artificial Sequence
  Description of Artificial Sequence: Synthetic oligonucleotide
actaactccacgtcccgaa

SEQ ID NO: 9894 - DNA, 22 bp, Artificial Sequence
  Description of Artificial Sequence: Synthetic oligonucleotide
gtcgcgttgtttaggtagtttt

SEQ ID NO: 9895 - DNA, 20 bp, Artificial Sequence
  Description of Artificial Sequence: Synthetic oligonucleotide
cctactaactccacgtcccg

SEQ ID NO: 9896 - DNA, 19 bp, Artificial Sequence
  Description of Artificial Sequence: Synthetic oligonucleotide
taactccacgtcccgaaaa

SEQ ID NO: 9897 - DNA, 20 bp, Artificial Sequence
  Description of Artificial Sequence: Synthetic oligonucleotide
taccgtcgtttttcaaatca

SEQ ID NO: 9898 - DNA, 20 bp, Artificial Sequence
  Description of Artificial Sequence: Synthetic oligonucleotide
acgctttaccgtcgtttttc

SEQ ID NO: 9899 - DNA, 19 bp, Artificial Sequence
  Description of Artificial Sequence: Synthetic oligonucleotide
acacgctttaccgtcgttt

SEQ ID NO: 9900 - DNA, 22 bp, Artificial Sequence
  Description of Artificial Sequence: Synthetic oligonucleotide
tcgcgttgtttaggtagttttg

SEQ ID NO: 9901 - DNA, 19 bp, Artificial Sequence
  Description of Artificial Sequence: Synthetic oligonucleotide
cgctttaccgtcgtttttc

SEQ ID NO: 9902 - DNA, 23 bp, Artificial Sequence
  Description of Artificial Sequence: Synthetic oligonucleotide
cgttgtttaggtagttttgtcgt

SEQ ID NO: 9903 - DNA, 19 bp, Artificial Sequence
  Description of Artificial Sequence: Synthetic oligonucleotide
ctaactccacgtcccgaaa

SEQ ID NO: 9904 - DNA, 19 bp, Artificial Sequence
  Description of Artificial Sequence: Synthetic oligonucleotide
tcggagggtttagttagcg

SEQ ID NO: 9905 - DNA, 21 bp, Artificial Sequence
  Description of Artificial Sequence: Synthetic oligonucleotide
cgcgacaaaacaatatctcct

SEQ ID NO: 9906 - DNA, 23 bp, Artificial Sequence
  Description of Artificial Sequence: Synthetic oligonucleotide
tgcgcggtaggagttgggcgcgt

SEQ ID NO: 9907 - DNA, 18 bp, Artificial Sequence
  Description of Artificial Sequence: Synthetic oligonucleotide
ctaactccacgtcccgaa

SEQ ID NO: 9908 - DNA, 18 bp, Artificial Sequence
  Description of Artificial Sequence: Synthetic oligonucleotide
cgcgtggaggagatattg

SEQ ID NO: 9909 - DNA, 21 bp, Artificial Sequence
  Description of Artificial Sequence: Synthetic oligonucleotide
actcccgataaacaaataccg

SEQ ID NO: 9910 - DNA, 25 bp, Artificial Sequence
  Description of Artificial Sequence: Synthetic oligonucleotide
tttacgtcgtaggtaagcggggcgg

SEQ ID NO: 9911 - DNA, 19 bp, Artificial Sequence
  Description of Artificial Sequence: Synthetic oligonucleotide
ttagttagcgggttttcgg

SEQ ID NO: 9912 - DNA, 21 bp, Artificial Sequence
  Description of Artificial Sequence: Synthetic oligonucleotide
ggtcgcgttgtttaggtagtt

SEQ ID NO: 9913 - DNA, 20 bp, Artificial Sequence
  Description of Artificial Sequence: Synthetic oligonucleotide
taactccacgtcccgaaaac

SEQ ID NO: 9914 - DNA, 19 bp, Artificial Sequence
  Description of Artificial Sequence: Synthetic oligonucleotide
cacgctttaccgtcgtttt

SEQ ID NO: 9915 - DNA, 20 bp, Artificial Sequence
  Description of Artificial Sequence: Synthetic oligonucleotide
tttagttagcgggttttcgg

SEQ ID NO: 9916 - DNA, 18 bp, Artificial Sequence
  Description of Artificial Sequence: Synthetic oligonucleotide
aactccacgtcccgaaaa

SEQ ID NO: 9917 - DNA, 20 bp, Artificial Sequence
  Description of Artificial Sequence: Synthetic oligonucleotide
gtttagttagcgggttttcg

SEQ ID NO: 9918 - DNA, 22 bp, Artificial Sequence
  Description of Artificial Sequence: Synthetic oligonucleotide
aactcccgataaacaaataccg

SEQ ID NO: 9919 - DNA, 20 bp, Artificial Sequence
  Description of Artificial Sequence: Synthetic oligonucleotide
ttcggagggtttagttagcg

SEQ ID NO: 9920 - DNA, 19 bp, Artificial Sequence
  Description of Artificial Sequence: Synthetic oligonucleotide
accgtcgtttttcaaatca

SEQ ID NO: 9921 - DNA, 18 bp, Artificial Sequence
  Description of Artificial Sequence: Synthetic oligonucleotide
actccacgtcccgaaaac

SEQ ID NO: 9922 - DNA, 17 bp, Artificial Sequence
  Description of Artificial Sequence: Synthetic oligonucleotide
actccacgtcccgaaaa

SEQ ID NO: 9923 - DNA, 19 bp, Artificial Sequence
  Description of Artificial Sequence: Synthetic oligonucleotide
taggtagtttggtcgtcgg

SEQ ID NO: 9924 - DNA, 19 bp, Artificial Sequence
  Description of Artificial Sequence: Synthetic oligonucleotide
gctttaccgtcgtttttca

SEQ ID NO: 9925 - DNA, 22 bp, Artificial Sequence
  Description of Artificial Sequence: Synthetic oligonucleotide
atacgcgataaaaactaaacgc

SEQ ID NO: 9926 - DNA, 22 bp, Artificial Sequence
  Description of Artificial Sequence: Synthetic oligonucleotide
gtgggtaggtatcgtagtcgtc

SEQ ID NO: 9927 - DNA, 36 bp, Artificial Sequence
  Description of Artificial Sequence: Synthetic oligonucleotide
tacggcgtgaaggagcgtttcgggtttttatcgcgg

SEQ ID NO: 9928 - DNA, 21 bp, Artificial Sequence
  Description of Artificial Sequence: Synthetic oligonucleotide
aaacaaactccgaacgaaaac

SEQ ID NO: 9929 - DNA, 22 bp, Artificial Sequence
  Description of Artificial Sequence: Synthetic oligonucleotide
tagagtattcggtttatcggga

SEQ ID NO: 9930 - DNA, 22 bp, Artificial Sequence
  Description of Artificial Sequence: Synthetic oligonucleotide
tggaaaggcgcgggatgggggt

SEQ ID NO: 9931 - DNA, 22 bp, Artificial Sequence
  Description of Artificial Sequence: Synthetic oligonucleotide
gtcgaggacgtagagtaggaga

SEQ ID NO: 9932 - DNA, 22 bp, Artificial Sequence
  Description of Artificial Sequence: Synthetic oligonucleotide
ggtgggtaggtatcgtagtcgt

SEQ ID NO: 9933 - DNA, 21 bp, Artificial Sequence
  Description of Artificial Sequence: Synthetic oligonucleotide
cggtgggtaggtatcgtagtc

SEQ ID NO: 9934 - DNA, 21 bp, Artificial Sequence
  Description of Artificial Sequence: Synthetic oligonucleotide
tcggtgggtaggtatcgtagt

SEQ ID NO: 9935 - DNA, 23 bp, Artificial Sequence
  Description of Artificial Sequence: Synthetic oligonucleotide
gaaaactaaccgaacaaacgtaa

SEQ ID NO: 9936 - DNA, 21 bp, Artificial Sequence
  Description of Artificial Sequence: Synthetic oligonucleotide
tacgcgataaaaactaaacgc

SEQ ID NO: 9937 - DNA, 22 bp, Artificial Sequence
  Description of Artificial Sequence: Synthetic oligonucleotide
tcgaggacgtagagtaggagat

SEQ ID NO: 9938 - DNA, 22 bp, Artificial Sequence
  Description of Artificial Sequence: Synthetic oligonucleotide
ttcggtgggtaggtatcgtagt

SEQ ID NO: 9939 - DNA, 22 bp, Artificial Sequence
  Description of Artificial Sequence: Synthetic oligonucleotide
ggtaggtatcgtagtcgtcgtt

SEQ ID NO: 9940 - DNA, 23 bp, Artificial Sequence
  Description of Artificial Sequence: Synthetic oligonucleotide
aatacgcgataaaaactaaacgc

SEQ ID NO: 9941 - DNA, 23 bp, Artificial Sequence
  Description of Artificial Sequence: Synthetic oligonucleotide
atagagtattcggtttatcggga

SEQ ID NO: 9942 - DNA, 22 bp, Artificial Sequence
  Description of Artificial Sequence: Synthetic oligonucleotide
cgaggacgtagagtaggagatt

SEQ ID NO: 9943 - DNA, 22 bp, Artificial Sequence
  Description of Artificial Sequence: Synthetic oligonucleotide
aaaactaaccgaacaaacgtaa

SEQ ID NO: 9944 - DNA, 21 bp, Artificial Sequence
  Description of Artificial Sequence: Synthetic oligonucleotide
agtattcggtttatcgggaga

SEQ ID NO: 9945 - DNA, 21 bp, Artificial Sequence
  Description of Artificial Sequence: Synthetic oligonucleotide
agagtattcggtttatcggga

SEQ ID NO: 9946 - DNA, 21 bp, Artificial Sequence
  Description of Artificial Sequence: Synthetic oligonucleotide
tgggtaggtatcgtagtcgtc

SEQ ID NO: 9947 - DNA, 21 bp, Artificial Sequence
  Description of Artificial Sequence: Synthetic oligonucleotide
tttcggtgggtaggtatcgta

SEQ ID NO: 9948 - DNA, 22 bp, Artificial Sequence
  Description of Artificial Sequence: Synthetic oligonucleotide
ggtcgaggacgtagagtaggag

SEQ ID NO: 9949 - DNA, 22 bp, Artificial Sequence
  Description of Artificial Sequence: Synthetic oligonucleotide
aatctcctactctacgtcctcg

SEQ ID NO: 9950 - DNA, 23 bp, Artificial Sequence
  Description of Artificial Sequence: Synthetic oligonucleotide
ttacgtttgttcggttagttttc

SEQ ID NO: 9951 - DNA, 24 bp, Artificial Sequence
  Description of Artificial Sequence: Synthetic oligonucleotide
agcggttttgcgagggattcgggt

SEQ ID NO: 9952 - DNA, 22 bp, Artificial Sequence
  Description of Artificial Sequence: Synthetic oligonucleotide
gagtattcggtttatcgggaga

SEQ ID NO: 9953 - DNA, 20 bp, Artificial Sequence
  Description of Artificial Sequence: Synthetic oligonucleotide
aaaacaaactccgaacgaaa

SEQ ID NO: 9954 - DNA, 20 bp, Artificial Sequence
  Description of Artificial Sequence: Synthetic oligonucleotide
aaaaacaaactccgaacgaa

SEQ ID NO: 9955 - DNA, 21 bp, Artificial Sequence
  Description of Artificial Sequence: Synthetic oligonucleotide
gttagttttcgggagttcgtt

SEQ ID NO: 9956 - DNA, 20 bp, Artificial Sequence
  Description of Artificial Sequence: Synthetic oligonucleotide
ccgaaaactaaccgaacaaa

SEQ ID NO: 9957 - DNA, 22 bp, Artificial Sequence
  Description of Artificial Sequence: Synthetic oligonucleotide
ctcctactctacgtcctcgacc

SEQ ID NO: 9958 - DNA, 21 bp, Artificial Sequence
  Description of Artificial Sequence: Synthetic oligonucleotide
tcctactctacgtcctcgacc

SEQ ID NO: 9959 - DNA, 21 bp, Artificial Sequence
  Description of Artificial Sequence: Synthetic oligonucleotide
gtttgttcggttagttttcgg

SEQ ID NO: 9960 - DNA, 22 bp, Artificial Sequence
  Description of Artificial Sequence: Synthetic oligonucleotide
tacgtttgttcggttagttttc

SEQ ID NO: 9961 - DNA, 23 bp, Artificial Sequence
  Description of Artificial Sequence: Synthetic oligonucleotide
gcgtttagtttttatcgcgtatt

SEQ ID NO: 9962 - DNA, 20 bp, Artificial Sequence
  Description of Artificial Sequence: Synthetic oligonucleotide
acgcgataaaaactaaacgc

SEQ ID NO: 9963 - DNA, 21 bp, Artificial Sequence
  Description of Artificial Sequence: Synthetic oligonucleotide
cgataaaaactaaacgcgcac

SEQ ID NO: 9964 - DNA, 24 bp, Artificial Sequence
  Description of Artificial Sequence: Synthetic oligonucleotide
taatacgcgataaaaactaaacgc

SEQ ID NO: 9965 - DNA, 33 bp, Artificial Sequence
  Description of Artificial Sequence: Synthetic oligonucleotide
tacgtttgttcggttagttttcgggagttcgtt

SEQ ID NO: 9966 - DNA, 20 bp, Artificial Sequence
  Description of Artificial Sequence: Synthetic oligonucleotide
cgtgcgcgtttagtttttat

SEQ ID NO: 9967 - DNA, 22 bp, Artificial Sequence
  Description of Artificial Sequence: Synthetic oligonucleotide
taggtatcgtagtcgtcgtttc

SEQ ID NO: 9968 - DNA, 20 bp, Artificial Sequence
  Description of Artificial Sequence: Synthetic oligonucleotide
aacaaactccgaacgaaaac

SEQ ID NO: 9969 - DNA, 22 bp, Artificial Sequence
  Description of Artificial Sequence: Synthetic oligonucleotide
aatcgaaaacgaaccaaaataa

SEQ ID NO: 9970 - DNA, 20 bp, Artificial Sequence
  Description of Artificial Sequence: Synthetic oligonucleotide
gtttacgtcggcgattaggt

SEQ ID NO: 9971 - DNA, 32 bp, Artificial Sequence
  Description of Artificial Sequence: Synthetic oligonucleotide
agtaatacggtagggttgtttgggtaacgcgg

SEQ ID NO: 9972 - DNA, 24 bp, Artificial Sequence
  Description of Artificial Sequence: Synthetic oligonucleotide
attacgtttgttcggttagttttc

SEQ ID NO: 9973 - DNA, 23 bp, Artificial Sequence
  Description of Artificial Sequence: Synthetic oligonucleotide
gtaggtatcgtagtcgtcgtttc

SEQ ID NO: 9974 - DNA, 20 bp, Artificial Sequence
  Description of Artificial Sequence: Synthetic oligonucleotide
tttgttcggttagttttcgg

SEQ ID NO: 9975 - DNA, 19 bp, Artificial Sequence
  Description of Artificial Sequence: Synthetic oligonucleotide
aataaaccgcgttacccaa

SEQ ID NO: 9976 - DNA, 22 bp, Artificial Sequence
  Description of Artificial Sequence: Synthetic oligonucleotide
gttttagcgtcggtatcgttta

SEQ ID NO: 9977 - DNA, 34 bp, Artificial Sequence
  Description of Artificial Sequence: Synthetic oligonucleotide
ggcgattaggttgtttagtaatacggtagggttg

SEQ ID NO: 9978 - DNA, 19 bp, Artificial Sequence
  Description of Artificial Sequence: Synthetic oligonucleotide
aaataaaccgcgttaccca

SEQ ID NO: 9979 - DNA, 22 bp, Artificial Sequence
  Description of Artificial Sequence: Synthetic oligonucleotide
ttttagcgtcggtatcgtttac

SEQ ID NO: 9980 - DNA, 20 bp, Artificial Sequence
  Description of Artificial Sequence: Synthetic oligonucleotide
tagttttcgggagttcgttg

SEQ ID NO: 9981 - DNA, 20 bp, Artificial Sequence
  Description of Artificial Sequence: Synthetic oligonucleotide
aatcttctcccgataaaccg

SEQ ID NO: 9982 - DNA, 22 bp, Artificial Sequence
  Description of Artificial Sequence: Synthetic oligonucleotide
cgtttagtttttatcgcgtatt

SEQ ID NO: 9983 - DNA, 22 bp, Artificial Sequence
  Description of Artificial Sequence: Synthetic oligonucleotide
gtattcggtttatcgggagaag

SEQ ID NO: 9984 - DNA, 21 bp, Artificial Sequence
  Description of Artificial Sequence: Synthetic oligonucleotide
ttagttttcgggagttcgttg

SEQ ID NO: 9985 - DNA, 20 bp, Artificial Sequence
  Description of Artificial Sequence: Synthetic oligonucleotide
cggtcgaggacgtagagtag

SEQ ID NO: 9986 - DNA, 21 bp, Artificial Sequence
  Description of Artificial Sequence: Synthetic oligonucleotide
gtagtcgtgcgcgtttagttt

SEQ ID NO: 9987 - DNA, 23 bp, Artificial Sequence
  Description of Artificial Sequence: Synthetic oligonucleotide
gatagagtattcggtttatcggg

SEQ ID NO: 9988 - DNA, 20 bp, Artificial Sequence
  Description of Artificial Sequence: Synthetic oligonucleotide
aaacaaactccgaacgaaaa

SEQ ID NO: 9989 - DNA, 20 bp, Artificial Sequence
  Description of Artificial Sequence: Synthetic oligonucleotide
aaataaaccgcgttacccaa

SEQ ID NO: 9990 - DNA, 19 bp, Artificial Sequence
  Description of Artificial Sequence: Synthetic oligonucleotide
acgaaccaaaataaaccgc

SEQ ID NO: 9991 - DNA, 19 bp, Artificial Sequence
  Description of Artificial Sequence: Synthetic oligonucleotide
gaaccaaaataaaccgcgt

SEQ ID NO: 9992 - DNA, 24 bp, Artificial Sequence
  Description of Artificial Sequence: Synthetic oligonucleotide
gtaatacgcgataaaaactaaacg

SEQ ID NO: 9993 - DNA, 21 bp, Artificial Sequence
  Description of Artificial Sequence: Synthetic oligonucleotide
tattcggtttatcgggagaag

SEQ ID NO: 9994 - DNA, 20 bp, Artificial Sequence
  Description of Artificial Sequence: Synthetic oligonucleotide
tagtcgtgcgcgtttagttt

SEQ ID NO: 9995 - DNA, 20 bp, Artificial Sequence
  Description of Artificial Sequence: Synthetic oligonucleotide
ctactctacgtcctcgaccg

SEQ ID NO: 9996 - DNA, 21 bp, Artificial Sequence
  Description of Artificial Sequence: Synthetic oligonucleotide
cgtttgttcggttagttttcg

SEQ ID NO: 9997 - DNA, 23 bp, Artificial Sequence
  Description of Artificial Sequence: Synthetic oligonucleotide
caatctcctactctacgtcctcg

SEQ ID NO: 9998 - DNA, 20 bp, Artificial Sequence
  Description of Artificial Sequence: Synthetic oligonucleotide
tcggttagttttcgggagtt

SEQ ID NO: 9999 - DNA, 20 bp, Artificial Sequence
  Description of Artificial Sequence: Synthetic oligonucleotide
gttcggttagttttcgggag

SEQ ID NO: 10000 - DNA, 20 bp, Artificial Sequence
  Description of Artificial Sequence: Synthetic oligonucleotide
cggttagttttcgggagttc

SEQ ID NO: 10001 - DNA, 20 bp, Artificial Sequence
  Description of Artificial Sequence: Synthetic oligonucleotide
ggttagttttcgggagttcg

SEQ ID NO: 10002 - DNA, 21 bp, Artificial Sequence
  Description of Artificial Sequence: Synthetic oligonucleotide
ggttagttttcgggagttcgt

SEQ ID NO: 10003 - DNA, 21 bp, Artificial Sequence
  Description of Artificial Sequence: Synthetic oligonucleotide
gttcggttagttttcgggagt

SEQ ID NO: 10004 - DNA, 21 bp, Artificial Sequence
  Description of Artificial Sequence: Synthetic oligonucleotide
tcgtgcgcgtttagtttttat

SEQ ID NO: 10005 - DNA, 21 bp, Artificial Sequence
  Description of Artificial Sequence: Synthetic oligonucleotide
gtgcgcgtttagtttttatcg

SEQ ID NO: 10006 - DNA, 20 bp, Artificial Sequence
  Description of Artificial Sequence: Synthetic oligonucleotide
ttcggttagttttcgggagt

SEQ ID NO: 10007 - DNA, 21 bp, Artificial Sequence
  Description of Artificial Sequence: Synthetic oligonucleotide
acgtttgttcggttagttttc

SEQ ID NO: 10008 - DNA, 23 bp, Artificial Sequence
  Description of Artificial Sequence: Synthetic oligonucleotide
tgatagagtattcggtttatcgg

SEQ ID NO: 10009 - DNA, 21 bp, Artificial Sequence
  Description of Artificial Sequence: Synthetic oligonucleotide
ttcggttagttttcgggagtt

SEQ ID NO: 10010 - DNA, 20 bp, Artificial Sequence
  Description of Artificial Sequence: Synthetic oligonucleotide
tgcgcgtttagtttttatcg

SEQ ID NO: 10011 - DNA, 19 bp, Artificial Sequence
  Description of Artificial Sequence: Synthetic oligonucleotide
cccgaaaactaaccgaaca

SEQ ID NO: 10012 - DNA, 21 bp, Artificial Sequence
  Description of Artificial Sequence: Synthetic oligonucleotide
ataaaaactaaacgcgcacga

SEQ ID NO: 10013 - DNA, 25 bp, Artificial Sequence
  Description of Artificial Sequence: Synthetic oligonucleotide
tattacgtttgttcggttagttttc

SEQ ID NO: 10014 - DNA, 21 bp, Artificial Sequence
  Description of Artificial Sequence: Synthetic oligonucleotide
actcccgaaaactaaccgaac

SEQ ID NO: 10015 - DNA, 21 bp, Artificial Sequence
  Description of Artificial Sequence: Synthetic oligonucleotide
aggtatcgtagtcgtcgtttc

SEQ ID NO: 10016 - DNA, 22 bp, Artificial Sequence
  Description of Artificial Sequence: Synthetic oligonucleotide
tattcggtttatcgggagaaga

SEQ ID NO: 10017 - DNA, 20 bp, Artificial Sequence
  Description of Artificial Sequence: Synthetic oligonucleotide
ctcccgaaaactaaccgaac

SEQ ID NO: 10018 - DNA, 19 bp, Artificial Sequence
  Description of Artificial Sequence: Synthetic oligonucleotide
caaactccgaacgaaaacg

SEQ ID NO: 10019 - DNA, 20 bp, Artificial Sequence
  Description of Artificial Sequence: Synthetic oligonucleotide
gtattcggtttatcgggaga

SEQ ID NO: 10020 - DNA, 19 bp, Artificial Sequence
  Description of Artificial Sequence: Synthetic oligonucleotide
agttttcgggagttcgttg

SEQ ID NO: 10021 - DNA, 20 bp, Artificial Sequence
  Description of Artificial Sequence: Synthetic oligonucleotide
ttagttttcgggagttcgtt

SEQ ID NO: 10022 - DNA, 20 bp, Artificial Sequence
  Description of Artificial Sequence: Synthetic oligonucleotide
attcggtttatcgggagaag

SEQ ID NO: 10023 - DNA, 20 bp, Artificial Sequence
  Description of Artificial Sequence: Synthetic oligonucleotide
cggtttatcgggagaagatt

SEQ ID NO: 10024 - DNA, 23 bp, Artificial Sequence
  Description of Artificial Sequence: Synthetic oligonucleotide
ggaaaggcgcgggatgggggtag

SEQ ID NO: 10025 - DNA, 19 bp, Artificial Sequence
  Description of Artificial Sequence: Synthetic oligonucleotide
agtcgtgcgcgtttagttt

SEQ ID NO: 10026 - DNA, 21 bp, Artificial Sequence
  Description of Artificial Sequence: Synthetic oligonucleotide
ggtatcgtagtcgtcgtttcg

SEQ ID NO: 10027 - DNA, 19 bp, Artificial Sequence
  Description of Artificial Sequence: Synthetic oligonucleotide
tgttcggttagttttcggg

SEQ ID NO: 10028 - DNA, 20 bp, Artificial Sequence
  Description of Artificial Sequence: Synthetic oligonucleotide
gagcgtttcgggtttttatc

SEQ ID NO: 10029 - DNA, 22 bp, Artificial Sequence
  Description of Artificial Sequence: Synthetic oligonucleotide
tacgcgcggtagtcgtgcgcgt

SEQ ID NO: 10030 - DNA, 21 bp, Artificial Sequence
  Description of Artificial Sequence: Synthetic oligonucleotide
ggtgggtaggtatcgtagtcg

SEQ ID NO: 10031 - DNA, 20 bp, Artificial Sequence
  Description of Artificial Sequence: Synthetic oligonucleotide
taaaaactaaacgcgcacga

SEQ ID NO: 10032 - DNA, 20 bp, Artificial Sequence
  Description of Artificial Sequence: Synthetic oligonucleotide
cctactctacgtcctcgacc

SEQ ID NO: 10033 - DNA, 20 bp, Artificial Sequence
  Description of Artificial Sequence: Synthetic oligonucleotide
gataaaaactaaacgcgcac

SEQ ID NO: 10034 - DNA, 18 bp, Artificial Sequence
  Description of Artificial Sequence: Synthetic oligonucleotide
aactccgaacgaaaacgc

SEQ ID NO: 10035 - DNA, 19 bp, Artificial Sequence
  Description of Artificial Sequence: Synthetic oligonucleotide
cgcgataaaaactaaacgc

SEQ ID NO: 10036 - DNA, 25 bp, Artificial Sequence
  Description of Artificial Sequence: Synthetic oligonucleotide
gtattacgtttgttcggttagtttt

SEQ ID NO: 10037 - DNA, 19 bp, Artificial Sequence
  Description of Artificial Sequence: Synthetic oligonucleotide
ataaaccgcgttacccaaa

SEQ ID NO: 10038 - DNA, 20 bp, Artificial Sequence
  Description of Artificial Sequence: Synthetic oligonucleotide
ttcgttttagcgtcggtatc

SEQ ID NO: 10039 - DNA, 33 bp, Artificial Sequence
  Description of Artificial Sequence: Synthetic oligonucleotide
gtcggcgattaggttgtttagtaatacggtagg

SEQ ID NO: 10040 - DNA, 20 bp, Artificial Sequence
  Description of Artificial Sequence: Synthetic oligonucleotide
gcgcgtttagtttttatcgc

SEQ ID NO: 10041 - DNA, 19 bp, Artificial Sequence
  Description of Artificial Sequence: Synthetic oligonucleotide
cgaaacctaactccctcgc

SEQ ID NO: 10042 - DNA, 19 bp, Artificial Sequence
  Description of Artificial Sequence: Synthetic oligonucleotide
tcccgaaaactaaccgaac

SEQ ID NO: 10043 - DNA, 20 bp, Artificial Sequence
  Description of Artificial Sequence: Synthetic oligonucleotide
ttgttcggttagttttcggg

SEQ ID NO: 10044 - DNA, 20 bp, Artificial Sequence
  Description of Artificial Sequence: Synthetic oligonucleotide
tcggtttatcgggagaagat

SEQ ID NO: 10045 - DNA, 19 bp, Artificial Sequence
  Description of Artificial Sequence: Synthetic oligonucleotide
gtcgtgcgcgtttagtttt

SEQ ID NO: 10046 - DNA, 21 bp, Artificial Sequence
  Description of Artificial Sequence: Synthetic oligonucleotide
atctcctactctacgtcctcg

SEQ ID NO: 10047 - DNA, 24 bp, Artificial Sequence
  Description of Artificial Sequence: Synthetic oligonucleotide
ttgatagagtattcggtttatcgg

SEQ ID NO: 10048 - DNA, 21 bp, Artificial Sequence
  Description of Artificial Sequence: Synthetic oligonucleotide
tttcgttttagcgtcggtatc

SEQ ID NO: 10049 - DNA, 21 bp, Artificial Sequence
  Description of Artificial Sequence: Synthetic oligonucleotide
tttagcgtcggtatcgtttac

SEQ ID NO: 10050 - DNA, 21 bp, Artificial Sequence
  Description of Artificial Sequence: Synthetic oligonucleotide
caacgaactcccgaaaactaa

SEQ ID NO: 10051 - DNA, 20 bp, Artificial Sequence
  Description of Artificial Sequence: Synthetic oligonucleotide
cgcggtagggtagtgttttt

SEQ ID NO: 10052 - DNA, 33 bp, Artificial Sequence
  Description of Artificial Sequence: Synthetic oligonucleotide
tgcgcgtttagtttttatcgcgtattacgtttg

SEQ ID NO: 10053 - DNA, 21 bp, Artificial Sequence
  Description of Artificial Sequence: Synthetic oligonucleotide
ttcggtgggtaggtatcgtag

SEQ ID NO: 10054 - DNA, 20 bp, Artificial Sequence
  Description of Artificial Sequence: Synthetic oligonucleotide
aataaaccgcgttacccaaa

SEQ ID NO: 10055 - DNA, 21 bp, Artificial Sequence
  Description of Artificial Sequence: Synthetic oligonucleotide
attcggtttatcgggagaaga

SEQ ID NO: 10056 - DNA, 21 bp, Artificial Sequence
  Description of Artificial Sequence: Synthetic oligonucleotide
ttcggtttatcgggagaagat

SEQ ID NO: 10057 - DNA, 23 bp, Artificial Sequence
  Description of Artificial Sequence: Synthetic oligonucleotide
gttttagcgtcggtatcgtttac

SEQ ID NO: 10058 - DNA, 18 bp, Artificial Sequence
  Description of Artificial Sequence: Synthetic oligonucleotide
aaaactaaacgcgcacga

SEQ ID NO: 10059 - DNA, 19 bp, Artificial Sequence
  Description of Artificial Sequence: Synthetic oligonucleotide
aaactaaacgcgcacgact

SEQ ID NO: 10060 - DNA, 19 bp, Artificial Sequence
  Description of Artificial Sequence: Synthetic oligonucleotide
gagcgtttcgggtttttat

SEQ ID NO: 10061 - DNA, 21 bp, Artificial Sequence
  Description of Artificial Sequence: Synthetic oligonucleotide
gggttcggtttatgacgagta

SEQ ID NO: 10062 - DNA, 22 bp, Artificial Sequence
  Description of Artificial Sequence: Synthetic oligonucleotide
actcacccgacttctaaacgta

SEQ ID NO: 10063 - DNA, 33 bp, Artificial Sequence
  Description of Artificial Sequence: Synthetic oligonucleotide
ttgtatatcgttttgtggacgcgtatcgttagt

SEQ ID NO: 10064 - DNA, 21 bp, Artificial Sequence
  Description of Artificial Sequence: Synthetic oligonucleotide
tttcgtagcgttgagttgaag

SEQ ID NO: 10065 - DNA, 21 bp, Artificial Sequence
  Description of Artificial Sequence: Synthetic oligonucleotide
gactcctatcccgaacgaata

SEQ ID NO: 10066 - DNA, 25 bp, Artificial Sequence
  Description of Artificial Sequence: Synthetic oligonucleotide
tgagttattcgcgcgtacggagcga

SEQ ID NO: 10067 - DNA, 21 bp, Artificial Sequence
  Description of Artificial Sequence: Synthetic oligonucleotide
gttcggtttatgacgagtagc

SEQ ID NO: 10068 - DNA, 21 bp, Artificial Sequence
  Description of Artificial Sequence: Synthetic oligonucleotide
tttttcgtagcgttgagttga

SEQ ID NO: 10069 - DNA, 22 bp, Artificial Sequence
  Description of Artificial Sequence: Synthetic oligonucleotide
gactcctatcccgaacgaatac

SEQ ID NO: 10070 - DNA, 21 bp, Artificial Sequence
  Description of Artificial Sequence: Synthetic oligonucleotide
cgtagcgttgagttgaagttg

SEQ ID NO: 10071 - DNA, 21 bp, Artificial Sequence
  Description of Artificial Sequence: Synthetic oligonucleotide
acgagtagcggggtttgttat

SEQ ID NO: 10072 - DNA, 20 bp, Artificial Sequence
  Description of Artificial Sequence: Synthetic oligonucleotide
tcggtttatgacgagtagcg

SEQ ID NO: 10073 - DNA, 40 bp, Artificial Sequence
  Description of Artificial Sequence: Synthetic oligonucleotide
atcgttttgtggacgcgtatcgttagtacgattttatcgt

SEQ ID NO: 10074 - DNA, 21 bp, Artificial Sequence
  Description of Artificial Sequence: Synthetic oligonucleotide
gtgtattcgttcgggatagga

SEQ ID NO: 10075 - DNA, 21 bp, Artificial Sequence
  Description of Artificial Sequence: Synthetic oligonucleotide
acaacgcaaatatacgaacca

SEQ ID NO: 10076 - DNA, 25 bp, Artificial Sequence
  Description of Artificial Sequence: Synthetic oligonucleotide
ttttttggttggcgagcgggcgtta

SEQ ID NO: 10077 - DNA, 22 bp, Artificial Sequence
  Description of Artificial Sequence: Synthetic oligonucleotide
ctcctatcccgaacgaatacac

SEQ ID NO: 10078 - DNA, 22 bp, Artificial Sequence
  Description of Artificial Sequence: Synthetic oligonucleotide
actcctatcccgaacgaataca

SEQ ID NO: 10079 - DNA, 20 bp, Artificial Sequence
  Description of Artificial Sequence: Synthetic oligonucleotide
tgtattcgttcgggatagga

SEQ ID NO: 10080 - DNA, 21 bp, Artificial Sequence
  Description of Artificial Sequence: Synthetic oligonucleotide
tcctatcccgaacgaatacac

SEQ ID NO: 10081 - DNA, 20 bp, Artificial Sequence
  Description of Artificial Sequence: Synthetic oligonucleotide
cgagtagcggggtttgttat

SEQ ID NO: 10082 - DNA, 21 bp, Artificial Sequence
  Description of Artificial Sequence: Synthetic oligonucleotide
cgacaacgcaaatatacgaac

SEQ ID NO: 10083 - DNA, 22 bp, Artificial Sequence
  Description of Artificial Sequence: Synthetic oligonucleotide
atttggttcgtatatttgcgtt

SEQ ID NO: 10084 - DNA, 20 bp, Artificial Sequence
  Description of Artificial Sequence: Synthetic oligonucleotide
cgctactcgtcataaaccga

SEQ ID NO: 10085 - DNA, 22 bp, Artificial Sequence
  Description of Artificial Sequence: Synthetic oligonucleotide
ttcggcgcggggttcggagagg

SEQ ID NO: 10086 - DNA, 20 bp, Artificial Sequence
  Description of Artificial Sequence: Synthetic oligonucleotide
ctatcccgaacgaatacacg

SEQ ID NO: 10087 - DNA, 21 bp, Artificial Sequence
  Description of Artificial Sequence: Synthetic oligonucleotide
actcctatcccgaacgaatac

SEQ ID NO: 10088 - DNA, 22 bp, Artificial Sequence
  Description of Artificial Sequence: Synthetic oligonucleotide
ttttcgtagcgttgagttgaag

SEQ ID NO: 10089 - DNA, 19 bp, Artificial Sequence
  Description of Artificial Sequence: Synthetic oligonucleotide
aaccccgctactcgtcata

SEQ ID NO: 10090 - DNA, 19 bp, Artificial Sequence
  Description of Artificial Sequence: Synthetic oligonucleotide
accccgctactcgtcataa

SEQ ID NO: 10091 - DNA, 21 bp, Artificial Sequence
  Description of Artificial Sequence: Synthetic oligonucleotide
gtattcgttcgggataggagt

SEQ ID NO: 10092 - DNA, 21 bp, Artificial Sequence
  Description of Artificial Sequence: Synthetic oligonucleotide
gacaacgcaaatatacgaacc

SEQ ID NO: 10093 - DNA, 21 bp, Artificial Sequence
  Description of Artificial Sequence: Synthetic oligonucleotide
gaaccgacaacgcaaatatac

SEQ ID NO: 10094 - DNA, 20 bp, Artificial Sequence
  Description of Artificial Sequence: Synthetic oligonucleotide
gactcctatcccgaacgaat

SEQ ID NO: 10095 - DNA, 20 bp, Artificial Sequence
  Description of Artificial Sequence: Synthetic oligonucleotide
tatgacgagtagcggggttt

SEQ ID NO: 10096 - DNA, 22 bp, Artificial Sequence
  Description of Artificial Sequence: Synthetic oligonucleotide
gtgtattcgttcgggataggag

SEQ ID NO: 10097 - DNA, 22 bp, Artificial Sequence
  Description of Artificial Sequence: Synthetic oligonucleotide
tgtattcgttcgggataggagt

SEQ ID NO: 10098 - DNA, 21 bp, Artificial Sequence
  Description of Artificial Sequence: Synthetic oligonucleotide
ctcacccgacttctaaacgta

SEQ ID NO: 10099 - DNA, 20 bp, Artificial Sequence
  Description of Artificial Sequence: Synthetic oligonucleotide
cccgctactcgtcataaacc

SEQ ID NO: 10100 - DNA, 20 bp, Artificial Sequence
  Description of Artificial Sequence: Synthetic oligonucleotide
aaaccccgctactcgtcata

SEQ ID NO: 10101 - DNA, 20 bp, Artificial Sequence
  Description of Artificial Sequence: Synthetic oligonucleotide
cgtgtattcgttcgggatag

SEQ ID NO: 10102 - DNA, 20 bp, Artificial Sequence
  Description of Artificial Sequence: Synthetic oligonucleotide
taacaaaccccgctactcgt

SEQ ID NO: 10103 - DNA, 21 bp, Artificial Sequence
  Description of Artificial Sequence: Synthetic oligonucleotide
tggttcgtatatttgcgttgt

SEQ ID NO: 10104 - DNA, 19 bp, Artificial Sequence
  Description of Artificial Sequence: Synthetic oligonucleotide
ccccgctactcgtcataaa

SEQ ID NO: 10105 - DNA, 19 bp, Artificial Sequence
  Description of Artificial Sequence: Synthetic oligonucleotide
cggtttatgacgagtagcg

SEQ ID NO: 10106 - DNA, 22 bp, Artificial Sequence
  Description of Artificial Sequence: Synthetic oligonucleotide
gggcgttatatttggttcgtat

SEQ ID NO: 10107 - DNA, 21 bp, Artificial Sequence
  Description of Artificial Sequence: Synthetic oligonucleotide
ataacaaaccccgctactcgt

SEQ ID NO: 10108 - DNA, 21 bp, Artificial Sequence
  Description of Artificial Sequence: Synthetic oligonucleotide
tgcgttgtcggttcggcgcgg

SEQ ID NO: 10109 - DNA, 18 bp, Artificial Sequence
  Description of Artificial Sequence: Synthetic oligonucleotide
atgacgagtagcggggtt

SEQ ID NO: 10110 - DNA, 21 bp, Artificial Sequence
  Description of Artificial Sequence: Synthetic oligonucleotide
gttcgtatatttgcgttgtcg

SEQ ID NO: 10111 - DNA, 23 bp, Artificial Sequence
  Description of Artificial Sequence: Synthetic oligonucleotide
tatttggttcgtatatttgcgtt

SEQ ID NO: 10112 - DNA, 20 bp, Artificial Sequence
  Description of Artificial Sequence: Synthetic oligonucleotide
cctatcccgaacgaatacac

SEQ ID NO: 10113 - DNA, 18 bp, Artificial Sequence
  Description of Artificial Sequence: Synthetic oligonucleotide
gcgtagttaggggttcgg

SEQ ID NO: 10114 - DNA, 22 bp, Artificial Sequence
  Description of Artificial Sequence: Synthetic oligonucleotide
tccacaaaacgatatacaacga

SEQ ID NO: 10115 - DNA, 38 bp, Artificial Sequence
  Description of Artificial Sequence: Synthetic oligonucleotide
ggcgtcgttcgttgcgttgggggttcggtttatgacga

SEQ ID NO: 10116 - DNA, 18 bp, Artificial Sequence
  Description of Artificial Sequence: Synthetic oligonucleotide
gttcgggataggagtcgg

SEQ ID NO: 10117 - DNA, 22 bp, Artificial Sequence
  Description of Artificial Sequence: Synthetic oligonucleotide
aacgcaaatatacgaaccaaat

SEQ ID NO: 10118 - DNA, 22 bp, Artificial Sequence
  Description of Artificial Sequence: Synthetic oligonucleotide
ttggttcgtatatttgcgttgt

SEQ ID NO: 10119 - DNA, 20 bp, Artificial Sequence
  Description of Artificial Sequence: Synthetic oligonucleotide
cgacaacgcaaatatacgaa

SEQ ID NO: 10120 - DNA, 20 bp, Artificial Sequence
  Description of Artificial Sequence: Synthetic oligonucleotide
ttcggtttatgacgagtagc

SEQ ID NO: 10121 - DNA, 18 bp, Artificial Sequence
  Description of Artificial Sequence: Synthetic oligonucleotide
acaaaccccgctactcgt

SEQ ID NO: 10122 - DNA, 20 bp, Artificial Sequence
  Description of Artificial Sequence: Synthetic oligonucleotide
ttcgtatatttgcgttgtcg

SEQ ID NO: 10123 - DNA, 22 bp, Artificial Sequence
  Description of Artificial Sequence: Synthetic oligonucleotide
ctactcgtcataaaccgaaccc

SEQ ID NO: 10124 - DNA, 21 bp, Artificial Sequence
  Description of Artificial Sequence: Synthetic oligonucleotide
tactcgtcataaaccgaaccc

SEQ ID NO: 10125 - DNA, 21 bp, Artificial Sequence
  Description of Artificial Sequence: Synthetic oligonucleotide
tttggttcgtatatttgcgtt

SEQ ID NO: 10126 - DNA, 20 bp, Artificial Sequence
  Description of Artificial Sequence: Synthetic oligonucleotide
ttttcgtagcgttgagttga

SEQ ID NO: 10127 - DNA, 21 bp, Artificial Sequence
  Description of Artificial Sequence: Synthetic oligonucleotide
gtatatttgcgttgtcggttc

SEQ ID NO: 10128 - DNA, 24 bp, Artificial Sequence
  Description of Artificial Sequence: Synthetic oligonucleotide
gttaggggttcgggaaggcgtcgt

SEQ ID NO: 10129 - DNA, 20 bp, Artificial Sequence
  Description of Artificial Sequence: Synthetic oligonucleotide
ccccgctactcgtcataaac

SEQ ID NO: 10130 - DNA, 20 bp, Artificial Sequence
  Description of Artificial Sequence: Synthetic oligonucleotide
caacgcaaatatacgaacca

SEQ ID NO: 10131 - DNA, 21 bp, Artificial Sequence
  Description of Artificial Sequence: Synthetic oligonucleotide
ggttcgtatatttgcgttgtc

SEQ ID NO: 10132 - DNA, 21 bp, Artificial Sequence
  Description of Artificial Sequence: Synthetic oligonucleotide
cactcacccgacttctaaacg

SEQ ID NO: 10133 - DNA, 20 bp, Artificial Sequence
  Description of Artificial Sequence: Synthetic oligonucleotide
aaccccgctactcgtcataa

SEQ ID NO: 10134 - DNA, 22 bp, Artificial Sequence
  Description of Artificial Sequence: Synthetic oligonucleotide
tcgttgtatatcgttttgtgga

SEQ ID NO: 10135 - DNA, 18 bp, Artificial Sequence
  Description of Artificial Sequence: Synthetic oligonucleotide
gccgaacccgaactaaaa

SEQ ID NO: 10136 - DNA, 37 bp, Artificial Sequence
  Description of Artificial Sequence: Synthetic oligonucleotide
atcgttagtacgattttatcgtacgtttagaagtcgg

SEQ ID NO: 10137 - DNA, 20 bp, Artificial Sequence
  Description of Artificial Sequence: Synthetic oligonucleotide
ggttcggtttatgacgagta

SEQ ID NO: 10138 - DNA, 18 bp, Artificial Sequence
  Description of Artificial Sequence: Synthetic oligonucleotide
cgtagttaggggttcggg

SEQ ID NO: 10139 - DNA, 22 bp, Artificial Sequence
  Description of Artificial Sequence: Synthetic oligonucleotide
aaaacgatatacaacgaccaca

SEQ ID NO: 10140 - DNA, 22 bp, Artificial Sequence
  Description of Artificial Sequence: Synthetic oligonucleotide
caaaacgatatacaacgaccac

SEQ ID NO: 10141 - DNA, 22 bp, Artificial Sequence
  Description of Artificial Sequence: Synthetic oligonucleotide
acaaaacgatatacaacgacca

SEQ ID NO: 10142 - DNA, 22 bp, Artificial Sequence
  Description of Artificial Sequence: Synthetic oligonucleotide
aacgatatacaacgaccacaaa

SEQ ID NO: 10143 - DNA, 22 bp, Artificial Sequence
  Description of Artificial Sequence: Synthetic oligonucleotide
aaacgatatacaacgaccacaa

SEQ ID NO: 10144 - DNA, 22 bp, Artificial Sequence
  Description of Artificial Sequence: Synthetic oligonucleotide
aacgaacaacgaaatctaccat

SEQ ID NO: 10145 - DNA, 22 bp, Artificial Sequence
  Description of Artificial Sequence: Synthetic oligonucleotide
atttattcgatttttgaacgtg

SEQ ID NO: 10146 - DNA, 24 bp, Artificial Sequence
  Description of Artificial Sequence: Synthetic oligonucleotide
tgggatcgtgttggcgatacgcgt

SEQ ID NO: 10147 - DNA, 22 bp, Artificial Sequence
  Description of Artificial Sequence: Synthetic oligonucleotide
taacgaacaacgaaatctacca

SEQ ID NO: 10148 - DNA, 24 bp, Artificial Sequence
  Description of Artificial Sequence: Synthetic oligonucleotide
ttatttattcgatttttgaacgtg

SEQ ID NO: 10149 - DNA, 22 bp, Artificial Sequence
  Description of Artificial Sequence: Synthetic oligonucleotide
cgaacaacgaaatctaccataa

SEQ ID NO: 10150 - DNA, 23 bp, Artificial Sequence
  Description of Artificial Sequence: Synthetic oligonucleotide
tatttattcgatttttgaacgtg

SEQ ID NO: 10151 - DNA, 23 bp, Artificial Sequence
  Description of Artificial Sequence: Synthetic oligonucleotide
ataacgaacaacgaaatctacca

SEQ ID NO: 10152 - DNA, 23 bp, Artificial Sequence
  Description of Artificial Sequence: Synthetic oligonucleotide
acgaacaacgaaatctaccataa

SEQ ID NO: 10153 - DNA, 25 bp, Artificial Sequence
  Description of Artificial Sequence: Synthetic oligonucleotide
attatttattcgatttttgaacgtg

SEQ ID NO: 10154 - DNA, 21 bp, Artificial Sequence
  Description of Artificial Sequence: Synthetic oligonucleotide
tttattcgatttttgaacgtg

SEQ ID NO: 10155 - DNA, 22 bp, Artificial Sequence
  Description of Artificial Sequence: Synthetic oligonucleotide
cctataaccgctacacatcgtc

SEQ ID NO: 10156 - DNA, 21 bp, Artificial Sequence
  Description of Artificial Sequence: Synthetic oligonucleotide
ctatacaacttccctcgaccg

SEQ ID NO: 10157 - DNA, 20 bp, Artificial Sequence
  Description of Artificial Sequence: Synthetic oligonucleotide
cgtagatgtgcgggttagat

SEQ ID NO: 10158 - DNA, 21 bp, Artificial Sequence
  Description of Artificial Sequence: Synthetic oligonucleotide
ggcgaggcgcggggaggtttt

SEQ ID NO: 10159 - DNA, 24 bp, Artificial Sequence
  Description of Artificial Sequence: Synthetic oligonucleotide
tataacgaacaacgaaatctacca

SEQ ID NO: 10160 - DNA, 19 bp, Artificial Sequence
  Description of Artificial Sequence: Synthetic oligonucleotide
cgaaaacgcaaccaaaaat

SEQ ID NO: 10161 - DNA, 22 bp, Artificial Sequence
  Description of Artificial Sequence: Synthetic oligonucleotide
gacgatgtgtagcggttatagg

SEQ ID NO: 10162 - DNA, 32 bp, Artificial Sequence
  Description of Artificial Sequence: Synthetic oligonucleotide
gttatagatcgagtttttagcgtagcggacgg

SEQ ID NO: 10163 - DNA, 22 bp, Artificial Sequence
  Description of Artificial Sequence: Synthetic oligonucleotide
ttataggacgatgtgtagcggt

SEQ ID NO: 10164 - DNA, 22 bp, Artificial Sequence
  Description of Artificial Sequence: Synthetic oligonucleotide
ggacgatgtgtagcggttatag

SEQ ID NO: 10165 - DNA, 22 bp, Artificial Sequence
  Description of Artificial Sequence: Synthetic oligonucleotide
tataggacgatgtgtagcggtt

SEQ ID NO: 10166 - DNA, 22 bp, Artificial Sequence
  Description of Artificial Sequence: Synthetic oligonucleotide
taggacgatgtgtagcggttat

SEQ ID NO: 10167 - DNA, 18 bp, Artificial Sequence
  Description of Artificial Sequence: Synthetic oligonucleotide
atttttgaacgtgcggtg

SEQ ID NO: 10168 - DNA, 29 bp, Artificial Sequence
  Description of Artificial Sequence: Synthetic oligonucleotide
tggcgatacgcgtttataggacgatgtgt

SEQ ID NO: 10169 - DNA, 22 bp, Artificial Sequence
  Description of Artificial Sequence: Synthetic oligonucleotide
aacctataaccgctacacatcg

SEQ ID NO: 10170 - DNA, 18 bp, Artificial Sequence
  Description of Artificial Sequence: Synthetic oligonucleotide
agattttcggcgtttcgt

SEQ ID NO: 10171 - DNA, 33 bp, Artificial Sequence
  Description of Artificial Sequence: Synthetic oligonucleotide
tggggattatttattcgatttttgaacgtgcgg

SEQ ID NO: 10172 - DNA, 22 bp, Artificial Sequence
  Description of Artificial Sequence: Synthetic oligonucleotide
acctataaccgctacacatcgt

SEQ ID NO: 10173 - DNA, 25 bp, Artificial Sequence
  Description of Artificial Sequence: Synthetic oligonucleotide
ggattatttattcgatttttgaacg

SEQ ID NO: 10174 - DNA, 20 bp, Artificial Sequence
  Description of Artificial Sequence: Synthetic oligonucleotide
tatacaacttccctcgaccg

SEQ ID NO: 10175 - DNA, 21 bp, Artificial Sequence
  Description of Artificial Sequence: Synthetic oligonucleotide
ctcgaaacaaaaaccgaactc

SEQ ID NO: 10176 - DNA, 20 bp, Artificial Sequence
  Description of Artificial Sequence: Synthetic oligonucleotide
cgttcgttagttaggagggg

SEQ ID NO: 10177 - DNA, 22 bp, Artificial Sequence
  Description of Artificial Sequence: Synthetic oligonucleotide
tttataggacgatgtgtagcgg

SEQ ID NO: 10178 - DNA, 20 bp, Artificial Sequence
  Description of Artificial Sequence: Synthetic oligonucleotide
cccctcctaactaacgaacg

SEQ ID NO: 10179 - DNA, 22 bp, Artificial Sequence
  Description of Artificial Sequence: Synthetic oligonucleotide
tagatcgagtttttagcgtagc

SEQ ID NO: 10180 - DNA, 25 bp, Artificial Sequence
  Description of Artificial Sequence: Synthetic oligonucleotide
tttcggatttcgcgtcgggtcggta

SEQ ID NO: 10181 - DNA, 20 bp, Artificial Sequence
  Description of Artificial Sequence: Synthetic oligonucleotide
tcgaaacaaaaaccgaactc

SEQ ID NO: 10182 - DNA, 20 bp, Artificial Sequence
  Description of Artificial Sequence: Synthetic oligonucleotide
tcgttcgttagttaggaggg

SEQ ID NO: 10183 - DNA, 21 bp, Artificial Sequence
  Description of Artificial Sequence: Synthetic oligonucleotide
gatcgagtttttagcgtagcg

SEQ ID NO: 10184 - DNA, 18 bp, Artificial Sequence
  Description of Artificial Sequence: Synthetic oligonucleotide
gtttcgtcgagttcgggt

SEQ ID NO: 10185 - DNA, 34 bp, Artificial Sequence
  Description of Artificial Sequence: Synthetic oligonucleotide
attatttattcgatttttgaacgtgcggtgggat

SEQ ID NO: 10186 - DNA, 22 bp, Artificial Sequence
  Description of Artificial Sequence: Synthetic oligonucleotide
tataaccgctacacatcgtcct

SEQ ID NO: 10187 - DNA, 19 bp, Artificial Sequence
  Description of Artificial Sequence: Synthetic oligonucleotide
aagattttcggcgtttcgt

SEQ ID NO: 10188 - DNA, 22 bp, Artificial Sequence
  Description of Artificial Sequence: Synthetic oligonucleotide
ctataaccgctacacatcgtcc

SEQ ID NO: 10189 - DNA, 22 bp, Artificial Sequence
  Description of Artificial Sequence: Synthetic oligonucleotide
taaccgctacacatcgtcctat

SEQ ID NO: 10190 - DNA, 22 bp, Artificial Sequence
  Description of Artificial Sequence: Synthetic oligonucleotide
ataaccgctacacatcgtccta

SEQ ID NO: 10191 - DNA, 23 bp, Artificial Sequence
  Description of Artificial Sequence: Synthetic oligonucleotide
acctataaccgctacacatcgtc

SEQ ID NO: 10192 - DNA, 22 bp, Artificial Sequence
  Description of Artificial Sequence: Synthetic oligonucleotide
cgatctataacgaacaacgaaa

SEQ ID NO: 10193 - DNA, 20 bp, Artificial Sequence
  Description of Artificial Sequence: Synthetic oligonucleotide
tagcgtagatgtgcgggtta

SEQ ID NO: 10194 - DNA, 22 bp, Artificial Sequence
  Description of Artificial Sequence: Synthetic oligonucleotide
gtttataggacgatgtgtagcg

SEQ ID NO: 10195 - DNA, 22 bp, Artificial Sequence
  Description of Artificial Sequence: Synthetic oligonucleotide
cgtttataggacgatgtgtagc

SEQ ID NO: 10196 - DNA, 20 bp, Artificial Sequence
  Description of Artificial Sequence: Synthetic oligonucleotide
ccctcctaactaacgaacga

SEQ ID NO: 10197 - DNA, 18 bp, Artificial Sequence
  Description of Artificial Sequence: Synthetic oligonucleotide
gatttttgaacgtgcggt

SEQ ID NO: 10198 - DNA, 19 bp, Artificial Sequence
  Description of Artificial Sequence: Synthetic oligonucleotide
gggtcggtagcgtagatgt

SEQ ID NO: 10199 - DNA, 20 bp, Artificial Sequence
  Description of Artificial Sequence: Synthetic oligonucleotide
ctcgaaacaaaaaccgaact

SEQ ID NO: 10200 - DNA, 21 bp, Artificial Sequence
  Description of Artificial Sequence: Synthetic oligonucleotide
ataggacgatgtgtagcggtt

SEQ ID NO: 10201 - DNA, 21 bp, Artificial Sequence
  Description of Artificial Sequence: Synthetic oligonucleotide
aggacgatgtgtagcggttat

SEQ ID NO: 10202 - DNA, 20 bp, Artificial Sequence
  Description of Artificial Sequence: Synthetic oligonucleotide
atcgagtttttagcgtagcg

SEQ ID NO: 10203 - DNA, 22 bp, Artificial Sequence
  Description of Artificial Sequence: Synthetic oligonucleotide
accgctacacatcgtcctataa

SEQ ID NO: 10204 - DNA, 17 bp, Artificial Sequence
  Description of Artificial Sequence: Synthetic oligonucleotide
acgccacatctaacccg

SEQ ID NO: 10205 - DNA, 22 bp, Artificial Sequence
  Description of Artificial Sequence: Synthetic oligonucleotide
atggtagatttcgttgttcgtt

SEQ ID NO: 10206 - DNA, 23 bp, Artificial Sequence
  Description of Artificial Sequence: Synthetic oligonucleotide
atagatcgagtttttagcgtagc

SEQ ID NO: 10207 - DNA, 17 bp, Artificial Sequence
  Description of Artificial Sequence: Synthetic oligonucleotide
ggcgtttcgtcgagttc

SEQ ID NO: 10208 - DNA, 34 bp, Artificial Sequence
  Description of Artificial Sequence: Synthetic oligonucleotide
gggattatttattcgatttttgaacgtgcggtgg

SEQ ID NO: 10209 - DNA, 18 bp, Artificial Sequence
  Description of Artificial Sequence: Synthetic oligonucleotide
gattttcggcgtttcgtc

SEQ ID NO: 10210 - DNA, 17 bp, Artificial Sequence
  Description of Artificial Sequence: Synthetic oligonucleotide
tacgctaccgacccgac

SEQ ID NO: 10211 - DNA, 17 bp, Artificial Sequence
  Description of Artificial Sequence: Synthetic oligonucleotide
acgcgaaatccgaaaaa

SEQ ID NO: 10212 - DNA, 22 bp, Artificial Sequence
  Description of Artificial Sequence: Synthetic oligonucleotide
cgatgtgtagcggttataggtt

SEQ ID NO: 10213 - DNA, 19 bp, Artificial Sequence
  Description of Artificial Sequence: Synthetic oligonucleotide
gtagcgtagatgtgcgggt

SEQ ID NO: 10214 - DNA, 22 bp, Artificial Sequence
  Description of Artificial Sequence: Synthetic oligonucleotide
acgatgtgtagcggttataggt

SEQ ID NO: 10215 - DNA, 18 bp, Artificial Sequence
  Description of Artificial Sequence: Synthetic oligonucleotide
aagattttcggcgtttcg

SEQ ID NO: 10216 - DNA, 17 bp, Artificial Sequence
  Description of Artificial Sequence: Synthetic oligonucleotide
gacgcgaaatccgaaaa

SEQ ID NO: 10217 - DNA, 29 bp, Artificial Sequence
  Description of Artificial Sequence: Synthetic oligonucleotide
ggatcgtgttggcgatacgcgtttatagg

SEQ ID NO: 10218 - DNA, 18 bp, Artificial Sequence
  Description of Artificial Sequence: Synthetic oligonucleotide
ctacgctaccgacccgac

SEQ ID NO: 10219 - DNA, 17 bp, Artificial Sequence
  Description of Artificial Sequence: Synthetic oligonucleotide
gtttcgtcgagttcggg

SEQ ID NO: 10220 - DNA, 26 bp, Artificial Sequence
  Description of Artificial Sequence: Synthetic oligonucleotide
gattatttattcgatttttgaacgtg

SEQ ID NO: 10221 - DNA, 17 bp, Artificial Sequence
  Description of Artificial Sequence: Synthetic oligonucleotide
tctacgctaccgacccg

SEQ ID NO: 10222 - DNA, 22 bp, Artificial Sequence
  Description of Artificial Sequence: Synthetic oligonucleotide
tggtagatttcgttgttcgtta

SEQ ID NO: 10223 - DNA, 17 bp, Artificial Sequence
  Description of Artificial Sequence: Synthetic oligonucleotide
tttcgtcgagttcgggt

SEQ ID NO: 10224 - DNA, 24 bp, Artificial Sequence
  Description of Artificial Sequence: Synthetic oligonucleotide
ctataacgaacaacgaaatctacc

SEQ ID NO: 10225 - DNA, 22 bp, Artificial Sequence
  Description of Artificial Sequence: Synthetic oligonucleotide
caacgaaatctaccataaatcg

SEQ ID NO: 10226 - DNA, 23 bp, Artificial Sequence
  Description of Artificial Sequence: Synthetic oligonucleotide
cgaaatctaccataaatcgaaaa

SEQ ID NO: 10227 - DNA, 17 bp, Artificial Sequence
  Description of Artificial Sequence: Synthetic oligonucleotide
tttttgaacgtgcggtg

SEQ ID NO: 10228 - DNA, 18 bp, Artificial Sequence
  Description of Artificial Sequence: Synthetic oligonucleotide
tcgatttttgaacgtgcg

SEQ ID NO: 10229 - DNA, 19 bp, Artificial Sequence
  Description of Artificial Sequence: Synthetic oligonucleotide
atacaacttccctcgaccg

SEQ ID NO: 10230 - DNA, 17 bp, Artificial Sequence
  Description of Artificial Sequence: Synthetic oligonucleotide
acgcaaccaaaaatccg

SEQ ID NO: 10231 - DNA, 19 bp, Artificial Sequence
  Description of Artificial Sequence: Synthetic oligonucleotide
acgaacgccacatctaacc

SEQ ID NO: 10232 - DNA, 23 bp, Artificial Sequence
  Description of Artificial Sequence: Synthetic oligonucleotide
acaacgaaatctaccataaatcg

SEQ ID NO: 10233 - DNA, 21 bp, Artificial Sequence
  Description of Artificial Sequence: Synthetic oligonucleotide
acgatgtgtagcggttatagg

SEQ ID NO: 10234 - DNA, 22 bp, Artificial Sequence
  Description of Artificial Sequence: Synthetic oligonucleotide
ccgctacacatcgtcctataaa

SEQ ID NO: 10235 - DNA, 19 bp, Artificial Sequence
  Description of Artificial Sequence: Synthetic oligonucleotide
cgtagatgtgcgggttaga

SEQ ID NO: 10236 - DNA, 20 bp, Artificial Sequence
  Description of Artificial Sequence: Synthetic oligonucleotide
gagtttttagcgtagcggac

SEQ ID NO: 10237 - DNA, 18 bp, Artificial Sequence
  Description of Artificial Sequence: Synthetic oligonucleotide
tttcgtcgagttcgggtt

SEQ ID NO: 10238 - DNA, 29 bp, Artificial Sequence
  Description of Artificial Sequence: Synthetic oligonucleotide
ttcgatttttgaacgtgcggtgggatcgt

SEQ ID NO: 10239 - DNA, 21 bp, Artificial Sequence
  Description of Artificial Sequence: Synthetic oligonucleotide
aaccgctacacatcgtcctat

SEQ ID NO: 10240 - DNA, 18 bp, Artificial Sequence
  Description of Artificial Sequence: Synthetic oligonucleotide
gcgtagatgtgcgggtta

SEQ ID NO: 10241 - DNA, 18 bp, Artificial Sequence
  Description of Artificial Sequence: Synthetic oligonucleotide
gacgcgaaatccgaaaaa

SEQ ID NO: 10242 - DNA, 21 bp, Artificial Sequence
  Description of Artificial Sequence: Synthetic oligonucleotide
agatcgagtttttagcgtagc

SEQ ID NO: 10243 - DNA, 19 bp, Artificial Sequence
  Description of Artificial Sequence: Synthetic oligonucleotide
gtcggtagcgtagatgtgc

SEQ ID NO: 10244 - DNA, 19 bp, Artificial Sequence
  Description of Artificial Sequence: Synthetic oligonucleotide
ccgcaacgctaaattaaaa

SEQ ID NO: 10245 - DNA, 21 bp, Artificial Sequence
  Description of Artificial Sequence: Synthetic oligonucleotide
cggtcgagggaagttgtatag

SEQ ID NO: 10246 - DNA, 27 bp, Artificial Sequence
  Description of Artificial Sequence: Synthetic oligonucleotide
ggagttcggtttttgtttcgagcgggt

SEQ ID NO: 10247 - DNA, 19 bp, Artificial Sequence
  Description of Artificial Sequence: Synthetic oligonucleotide
agcgtagatgtgcgggtta

SEQ ID NO: 10248 - DNA, 17 bp, Artificial Sequence
  Description of Artificial Sequence: Synthetic oligonucleotide
ttcgtcgagttcgggtt

SEQ ID NO: 10249 - DNA, 25 bp, Artificial Sequence
  Description of Artificial Sequence: Synthetic oligonucleotide
ttatagatcgagtttttagcgtagc

SEQ ID NO: 10250 - DNA, 34 bp, Artificial Sequence
  Description of Artificial Sequence: Synthetic oligonucleotide
agcggacggcgttttttcggatttttggttgcgt

SEQ ID NO: 10251 - DNA, 17 bp, Artificial Sequence
  Description of Artificial Sequence: Synthetic oligonucleotide
cgatttttgaacgtgcg

SEQ ID NO: 10252 - DNA, 22 bp, Artificial Sequence
  Description of Artificial Sequence: Synthetic oligonucleotide
ctacacatcgtcctataaacgc

SEQ ID NO: 10253 - DNA, 22 bp, Artificial Sequence
  Description of Artificial Sequence: Synthetic oligonucleotide
cgctacacatcgtcctataaac

SEQ ID NO: 10254 - DNA, 17 bp, Artificial Sequence
  Description of Artificial Sequence: Synthetic oligonucleotide
attttcggcgtttcgtc

SEQ ID NO: 10255 - DNA, 22 bp, Artificial Sequence
  Description of Artificial Sequence: Synthetic oligonucleotide
ttatggtagatttcgttgttcg

SEQ ID NO: 10256 - DNA, 17 bp, Artificial Sequence
  Description of Artificial Sequence: Synthetic oligonucleotide
cgtttcgtcgagttcgg

SEQ ID NO: 10257 - DNA, 23 bp, Artificial Sequence
  Description of Artificial Sequence: Synthetic oligonucleotide
acgaaatctaccataaatcgaaa

SEQ ID NO: 10258 - DNA, 23 bp, Artificial Sequence
  Description of Artificial Sequence: Synthetic oligonucleotide
aacgaaatctaccataaatcgaa

SEQ ID NO: 10259 - DNA, 19 bp, Artificial Sequence
  Description of Artificial Sequence: Synthetic oligonucleotide
gctcgaaacaaaaaccgaa

SEQ ID NO: 10260 - DNA, 19 bp, Artificial Sequence
  Description of Artificial Sequence: Synthetic oligonucleotide
ggtcggtagcgtagatgtg

SEQ ID NO: 10261 - DNA, 18 bp, Artificial Sequence
  Description of Artificial Sequence: Synthetic oligonucleotide
aacgcaaccaaaaatccg

SEQ ID NO: 10262 - DNA, 23 bp, Artificial Sequence
  Description of Artificial Sequence: Synthetic oligonucleotide
tatggtagatttcgttgttcgtt

SEQ ID NO: 10263 - DNA, 20 bp, Artificial Sequence
  Description of Artificial Sequence: Synthetic oligonucleotide
agtttttagcgtagcggacg

SEQ ID NO: 10264 - DNA, 24 bp, Artificial Sequence
  Description of Artificial Sequence: Synthetic oligonucleotide
tatagatcgagtttttagcgtagc

SEQ ID NO: 10265 - DNA, 23 bp, Artificial Sequence
  Description of Artificial Sequence: Synthetic oligonucleotide
tttatggtagatttcgttgttcg

SEQ ID NO: 10266 - DNA, 20 bp, Artificial Sequence
  Description of Artificial Sequence: Synthetic oligonucleotide
cgaaacaaaaaccgaactcc

SEQ ID NO: 10267 - DNA, 19 bp, Artificial Sequence
  Description of Artificial Sequence: Synthetic oligonucleotide
gtttttagcgtagcggacg

SEQ ID NO: 10268 - DNA, 17 bp, Artificial Sequence
  Description of Artificial Sequence: Synthetic oligonucleotide
agattttcggcgtttcg

SEQ ID NO: 10269 - DNA, 23 bp, Artificial Sequence
  Description of Artificial Sequence: Synthetic oligonucleotide
tcgatttatggtagatttcgttg

SEQ ID NO: 10270 - DNA, 23 bp, Artificial Sequence
  Description of Artificial Sequence: Synthetic oligonucleotide
tggtagatttcgttgttcgttat

SEQ ID NO: 10271 - DNA, 19 bp, Artificial Sequence
  Description of Artificial Sequence: Synthetic oligonucleotide
atttttggttgcgttttcg

SEQ ID NO: 10272 - DNA, 18 bp, Artificial Sequence
  Description of Artificial Sequence: Synthetic oligonucleotide
gtacacccgctcgaaaca

SEQ ID NO: 10273 - DNA, 20 bp, Artificial Sequence
  Description of Artificial Sequence: Synthetic oligonucleotide
gttagatgtggcgttcgttc

SEQ ID NO: 10274 - DNA, 19 bp, Artificial Sequence
  Description of Artificial Sequence: Synthetic oligonucleotide
cgagtttttagcgtagcgg

SEQ ID NO: 10275 - DNA, 22 bp, Artificial Sequence
  Description of Artificial Sequence: Synthetic oligonucleotide
gcgtttataggacgatgtgtag

SEQ ID NO: 10276 - DNA, 18 bp, Artificial Sequence
  Description of Artificial Sequence: Synthetic oligonucleotide
cgaacgccacatctaacc

SEQ ID NO: 10277 - DNA, 19 bp, Artificial Sequence
  Description of Artificial Sequence: Synthetic oligonucleotide
gttagatgtggcgttcgtt

SEQ ID NO: 10278 - DNA, 17 bp, Artificial Sequence
  Description of Artificial Sequence: Synthetic oligonucleotide
tcgtcgagttcgggttg

SEQ ID NO: 10279 - DNA, 22 bp, Artificial Sequence
  Description of Artificial Sequence: Synthetic oligonucleotide
gtcgaggagtttagcgttagtg

SEQ ID NO: 10280 - DNA, 21 bp, Artificial Sequence
  Description of Artificial Sequence: Synthetic oligonucleotide
gactctatacccgacgcctac

SEQ ID NO: 10281 - DNA, 28 bp, Artificial Sequence
  Description of Artificial Sequence: Synthetic oligonucleotide
ggcggttaggagagattcgggtgttagg

SEQ ID NO: 10282 - DNA, 22 bp, Artificial Sequence
  Description of Artificial Sequence: Synthetic oligonucleotide
gtaggtcgttagtagttcgcgt

SEQ ID NO: 10283 - DNA, 21 bp, Artificial Sequence
  Description of Artificial Sequence: Synthetic oligonucleotide
atacgaacaaaaccctaaccg

SEQ ID NO: 10284 - DNA, 36 bp, Artificial Sequence
  Description of Artificial Sequence: Synthetic oligonucleotide
gatcgcgtagattttgatattttcgtttggttttgg

SEQ ID NO: 10285 - DNA, 22 bp, Artificial Sequence
  Description of Artificial Sequence: Synthetic oligonucleotide
gtcgttagtagttcgcgttagg

SEQ ID NO: 10286 - DNA, 21 bp, Artificial Sequence
  Description of Artificial Sequence: Synthetic oligonucleotide
gaaactaaacgcccgaaaata

SEQ ID NO: 10287 - DNA, 22 bp, Artificial Sequence
  Description of Artificial Sequence: Synthetic oligonucleotide
tcgtttagtatgtcgggttttt

SEQ ID NO: 10288 - DNA, 21 bp, Artificial Sequence
  Description of Artificial Sequence: Synthetic oligonucleotide
aactctctaccgaccaacgac

SEQ ID NO: 10289 - DNA, 29 bp, Artificial Sequence
  Description of Artificial Sequence: Synthetic oligonucleotide
tacgtggtcgagggttttggaagtttcga

SEQ ID NO: 10290 - DNA, 22 bp, Artificial Sequence
  Description of Artificial Sequence: Synthetic oligonucleotide
aatacgaacaaaaccctaaccg

SEQ ID NO: 10291 - DNA, 22 bp, Artificial Sequence
  Description of Artificial Sequence: Synthetic oligonucleotide
tcgtaggtcgttagtagttcgc

SEQ ID NO: 10292 - DNA, 22 bp, Artificial Sequence
  Description of Artificial Sequence: Synthetic oligonucleotide
atcggttcggagttagattacg

SEQ ID NO: 10293 - DNA, 22 bp, Artificial Sequence
  Description of Artificial Sequence: Synthetic oligonucleotide
aaaaacccgacatactaaacga

SEQ ID NO: 10294 - DNA, 29 bp, Artificial Sequence
  Description of Artificial Sequence: Synthetic oligonucleotide
agtagcgtcgttattgagagtcgttcgga

SEQ ID NO: 10295 - DNA, 21 bp, Artificial Sequence
  Description of Artificial Sequence: Synthetic oligonucleotide
aaaactaaaaacgccgatacc

SEQ ID NO: 10296 - DNA, 28 bp, Artificial Sequence
  Description of Artificial Sequence: Synthetic oligonucleotide
gggatagtagggagttcgggggaaacgt

SEQ ID NO: 10297 - DNA, 22 bp, Artificial Sequence
  Description of Artificial Sequence: Synthetic oligonucleotide
ttcgtttagtatgtcgggtttt

SEQ ID NO: 10298 - DNA, 21 bp, Artificial Sequence
  Description of Artificial Sequence: Synthetic oligonucleotide
cgaaactctctaccgaccaac

SEQ ID NO: 10299 - DNA, 21 bp, Artificial Sequence
  Description of Artificial Sequence: Synthetic oligonucleotide
tcgaggagtttagcgttagtg

SEQ ID NO: 10300 - DNA, 22 bp, Artificial Sequence
  Description of Artificial Sequence: Synthetic oligonucleotide
acaaaactaaaaacgccgatac

SEQ ID NO: 10301 - DNA, 21 bp, Artificial Sequence
  Description of Artificial Sequence: Synthetic oligonucleotide
ggttttattgacgcgattttt

SEQ ID NO: 10302 - DNA, 22 bp, Artificial Sequence
  Description of Artificial Sequence: Synthetic oligonucleotide
aaacccgacatactaaacgaat

SEQ ID NO: 10303 - DNA, 34 bp, Artificial Sequence
  Description of Artificial Sequence: Synthetic oligonucleotide
ttatgggtagaggatatcggttcggagttagatt

SEQ ID NO: 10304 - DNA, 22 bp, Artificial Sequence
  Description of Artificial Sequence: Synthetic oligonucleotide
tcgttagtagttcgcgttaggt

SEQ ID NO: 10305 - DNA, 20 bp, Artificial Sequence
  Description of Artificial Sequence: Synthetic oligonucleotide
gaaactaaacgcccgaaaat

SEQ ID NO: 10306 - DNA, 21 bp, Artificial Sequence
  Description of Artificial Sequence: Synthetic oligonucleotide
cgaggagtttagcgttagtgg

SEQ ID NO: 10307 - DNA, 22 bp, Artificial Sequence
  Description of Artificial Sequence: Synthetic oligonucleotide
gacaaaactaaaaacgccgata

SEQ ID NO: 10308 - DNA, 21 bp, Artificial Sequence
  Description of Artificial Sequence: Synthetic oligonucleotide
tcggttcggagttagattacg

SEQ ID NO: 10309 - DNA, 20 bp, Artificial Sequence
  Description of Artificial Sequence: Synthetic oligonucleotide
accgaaactctctaccgacc

SEQ ID NO: 10310 - DNA, 21 bp, Artificial Sequence
  Description of Artificial Sequence: Synthetic oligonucleotide
cgtcgaggagtttagcgttag

SEQ ID NO: 10311 - DNA, 21 bp, Artificial Sequence
  Description of Artificial Sequence: Synthetic oligonucleotide
acaaaactaaaaacgccgata

SEQ ID NO: 10312 - DNA, 21 bp, Artificial Sequence
  Description of Artificial Sequence: Synthetic oligonucleotide
tcaaaccgaaactctctaccg

SEQ ID NO: 10313 - DNA, 20 bp, Artificial Sequence
  Description of Artificial Sequence: Synthetic oligonucleotide
tacgaacaaaaccctaaccg

SEQ ID NO: 10314 - DNA, 22 bp, Artificial Sequence
  Description of Artificial Sequence: Synthetic oligonucleotide
tttggttttcgtaggtcgttag

SEQ ID NO: 10315 - DNA, 23 bp, Artificial Sequence
  Description of Artificial Sequence: Synthetic oligonucleotide
gaaaatatcaaaatctacgcgat

SEQ ID NO: 10316 - DNA, 25 bp, Artificial Sequence
  Description of Artificial Sequence: Synthetic oligonucleotide
agttcgcgttaggtttcgtcggcgt

SEQ ID NO: 10317 - DNA, 23 bp, Artificial Sequence
  Description of Artificial Sequence: Synthetic oligonucleotide
tatcggttcggagttagattacg

SEQ ID NO: 10318 - DNA, 20 bp, Artificial Sequence
  Description of Artificial Sequence: Synthetic oligonucleotide
cggttcggagttagattacg

SEQ ID NO: 10319 - DNA, 21 bp, Artificial Sequence
  Description of Artificial Sequence: Synthetic oligonucleotide
aaccgaaactctctaccgacc

SEQ ID NO: 10320 - DNA, 23 bp, Artificial Sequence
  Description of Artificial Sequence: Synthetic oligonucleotide
attcgtttagtatgtcgggtttt

SEQ ID NO: 10321 - DNA, 21 bp, Artificial Sequence
  Description of Artificial Sequence: Synthetic oligonucleotide
actctctaccgaccaacgaca

SEQ ID NO: 10322 - DNA, 20 bp, Artificial Sequence
  Description of Artificial Sequence: Synthetic oligonucleotide
gtgtcgttggtcggtagaga

SEQ ID NO: 10323 - DNA, 22 bp, Artificial Sequence
  Description of Artificial Sequence: Synthetic oligonucleotide
aaactcgaactctaaatcccgt

SEQ ID NO: 10324 - DNA, 32 bp, Artificial Sequence
  Description of Artificial Sequence: Synthetic oligonucleotide
gtttggtgcgcgtagagaataattttaagcgt

SEQ ID NO: 10325 - DNA, 22 bp, Artificial Sequence
  Description of Artificial Sequence: Synthetic oligonucleotide
aactcgaactctaaatcccgtt

SEQ ID NO: 10326 - DNA, 20 bp, Artificial Sequence
  Description of Artificial Sequence: Synthetic oligonucleotide
ctctctaccgaccaacgaca

SEQ ID NO: 10327 - DNA, 22 bp, Artificial Sequence
  Description of Artificial Sequence: Synthetic oligonucleotide
cgtcgaggagtttagcgttagt

SEQ ID NO: 10328 - DNA, 22 bp, Artificial Sequence
  Description of Artificial Sequence: Synthetic oligonucleotide
taaactcgaactctaaatcccg

SEQ ID NO: 10329 - DNA, 21 bp, Artificial Sequence
  Description of Artificial Sequence: Synthetic oligonucleotide
tgtcgttggtcggtagagagt

SEQ ID NO: 10330 - DNA, 20 bp, Artificial Sequence
  Description of Artificial Sequence: Synthetic oligonucleotide
gggtttttatttcgtgcgtt

SEQ ID NO: 10331 - DNA, 22 bp, Artificial Sequence
  Description of Artificial Sequence: Synthetic oligonucleotide
cgcaaactaaattctctaaccg

SEQ ID NO: 10332 - DNA, 32 bp, Artificial Sequence
  Description of Artificial Sequence: Synthetic oligonucleotide
ggtgagttatgaagatgtgcgagttagtcgga

SEQ ID NO: 10333 - DNA, 20 bp, Artificial Sequence
  Description of Artificial Sequence: Synthetic oligonucleotide
tttggattttaagcgtttcg

SEQ ID NO: 10334 - DNA, 24 bp, Artificial Sequence
  Description of Artificial Sequence: Synthetic oligonucleotide
agcgttagtggcggcggttaggag

SEQ ID NO: 10335 - DNA, 21 bp, Artificial Sequence
  Description of Artificial Sequence: Synthetic oligonucleotide
cgtaggtcgttagtagttcgc

SEQ ID NO: 10336 - DNA, 21 bp, Artificial Sequence
  Description of Artificial Sequence: Synthetic oligonucleotide
taggtcgttagtagttcgcgt

SEQ ID NO: 10337 - DNA, 19 bp, Artificial Sequence
  Description of Artificial Sequence: Synthetic oligonucleotide
tggtgcgcgtagagaataa

SEQ ID NO: 10338 - DNA, 22 bp, Artificial Sequence
  Description of Artificial Sequence: Synthetic oligonucleotide
ccgcctataaactcgaactcta

SEQ ID NO: 10339 - DNA, 37 bp, Artificial Sequence
  Description of Artificial Sequence: Synthetic oligonucleotide
agcgtatcgacgttcgcgagttttttttaaatatcga

SEQ ID NO: 10340 - DNA, 19 bp, Artificial Sequence
  Description of Artificial Sequence: Synthetic oligonucleotide
ttggtgcgcgtagagaata

SEQ ID NO: 10341 - DNA, 22 bp, Artificial Sequence
  Description of Artificial Sequence: Synthetic oligonucleotide
cgatcttcgacaaaactaaaaa

SEQ ID NO: 10342 - DNA, 20 bp, Artificial Sequence
  Description of Artificial Sequence: Synthetic oligonucleotide
tgtcgttggtcggtagagag

SEQ ID NO: 10343 - DNA, 21 bp, Artificial Sequence
  Description of Artificial Sequence: Synthetic oligonucleotide
acgccgataccgactctatac

SEQ ID NO: 10344 - DNA, 22 bp, Artificial Sequence
  Description of Artificial Sequence: Synthetic oligonucleotide
gaactctaaatcccgttcgata

SEQ ID NO: 10345 - DNA, 20 bp, Artificial Sequence
  Description of Artificial Sequence: Synthetic oligonucleotide
actaaacgcccgaaaatacg

SEQ ID NO: 10346 - DNA, 19 bp, Artificial Sequence
  Description of Artificial Sequence: Synthetic oligonucleotide
tatacccgacgcctacgtt

SEQ ID NO: 10347 - DNA, 20 bp, Artificial Sequence
  Description of Artificial Sequence: Synthetic oligonucleotide
ctatacccgacgcctacgtt

SEQ ID NO: 10348 - DNA, 23 bp, Artificial Sequence
  Description of Artificial Sequence: Synthetic oligonucleotide
aattcgtttagtatgtcgggttt

SEQ ID NO: 10349 - DNA, 23 bp, Artificial Sequence
  Description of Artificial Sequence: Synthetic oligonucleotide
gatcttcgacaaaactaaaaacg

SEQ ID NO: 10350 - DNA, 21 bp, Artificial Sequence
  Description of Artificial Sequence: Synthetic oligonucleotide
ttttggattttaagcgtttcg

SEQ ID NO: 10351 - DNA, 19 bp, Artificial Sequence
  Description of Artificial Sequence: Synthetic oligonucleotide
gtgtacgtggtcgagggtt

SEQ ID NO: 10352 - DNA, 22 bp, Artificial Sequence
  Description of Artificial Sequence: Synthetic oligonucleotide
tacgctaaatcaaaccgaaact

SEQ ID NO: 10353 - DNA, 24 bp, Artificial Sequence
  Description of Artificial Sequence: Synthetic oligonucleotide
ggcgggtgtcgttggtcggtagag

SEQ ID NO: 10354 - DNA, 22 bp, Artificial Sequence
  Description of Artificial Sequence: Synthetic oligonucleotide
aggtcgttagtagttcgcgtta

SEQ ID NO: 10355 - DNA, 19 bp, Artificial Sequence
  Description of Artificial Sequence: Synthetic oligonucleotide
ctaaacgcccgaaaatacg

SEQ ID NO: 10356 - DNA, 19 bp, Artificial Sequence
  Description of Artificial Sequence: Synthetic oligonucleotide
tctctaccgaccaacgaca

SEQ ID NO: 10357 - DNA, 22 bp, Artificial Sequence
  Description of Artificial Sequence: Synthetic oligonucleotide
actcgaactctaaatcccgttc

SEQ ID NO: 10358 - DNA, 19 bp, Artificial Sequence
  Description of Artificial Sequence: Synthetic oligonucleotide
gtacgtggtcgagggtttt

SEQ ID NO: 10359 - DNA, 23 bp, Artificial Sequence
  Description of Artificial Sequence: Synthetic oligonucleotide
atatcggttcggagttagattac

SEQ ID NO: 10360 - DNA, 20 bp, Artificial Sequence
  Description of Artificial Sequence: Synthetic oligonucleotide
gtcgttggtcggtagagagt

SEQ ID NO: 10361 - DNA, 22 bp, Artificial Sequence
  Description of Artificial Sequence: Synthetic oligonucleotide
caaaactaaaaacgccgatacc

SEQ ID NO: 10362 - DNA, 19 bp, Artificial Sequence
  Description of Artificial Sequence: Synthetic oligonucleotide
gtagggtgttggtcgtcgt

SEQ ID NO: 10363 - DNA, 22 bp, Artificial Sequence
  Description of Artificial Sequence: Synthetic oligonucleotide
cgcgaaaaacctctaaaaacta

SEQ ID NO: 10364 - DNA, 28 bp, Artificial Sequence
  Description of Artificial Sequence: Synthetic oligonucleotide
aggacgtggggtttaaatttcggttggg

SEQ ID NO: 10365 - DNA, 20 bp, Artificial Sequence
  Description of Artificial Sequence: Synthetic oligonucleotide
aaactaaacgcccgaaaata

SEQ ID NO: 10366 - DNA, 22 bp, Artificial Sequence
  Description of Artificial Sequence: Synthetic oligonucleotide
agtttcggtttgatttagcgta

SEQ ID NO: 10367 - DNA, 19 bp, Artificial Sequence
  Description of Artificial Sequence: Synthetic oligonucleotide
cgacgaccaacaccctact

SEQ ID NO: 10368 - DNA, 38 bp, Artificial Sequence
  Description of Artificial Sequence: Synthetic oligonucleotide
aacgggatttagagttcgagtttataggcggcggtcgg

SEQ ID NO: 10369 - DNA, 22 bp, Artificial Sequence
  Description of Artificial Sequence: Synthetic oligonucleotide
cgtttttggcgttaaagatagt

SEQ ID NO: 10370 - DNA, 19 bp, Artificial Sequence
  Description of Artificial Sequence: Synthetic oligonucleotide
cgacctcttcccgaaatta

SEQ ID NO: 10371 - DNA, 29 bp, Artificial Sequence
  Description of Artificial Sequence: Synthetic oligonucleotide
ttttatttcgggtttcgagggtcgttggg

SEQ ID NO: 10372 - DNA, 22 bp, Artificial Sequence
  Description of Artificial Sequence: Synthetic oligonucleotide
gtcgtttttggcgttaaagata

SEQ ID NO: 10373 - DNA, 20 bp, Artificial Sequence
  Description of Artificial Sequence: Synthetic oligonucleotide
agtagggtgttggtcgtcgt

SEQ ID NO: 10374 - DNA, 19 bp, Artificial Sequence
  Description of Artificial Sequence: Synthetic oligonucleotide
agtttagcgttagtggcgg

SEQ ID NO: 10375 - DNA, 22 bp, Artificial Sequence
  Description of Artificial Sequence: Synthetic oligonucleotide
tcttcgacaaaactaaaaacgc

SEQ ID NO: 10376 - DNA, 20 bp, Artificial Sequence
  Description of Artificial Sequence: Synthetic oligonucleotide
tttggtgcgcgtagagaata

SEQ ID NO: 10377 - DNA, 19 bp, Artificial Sequence
  Description of Artificial Sequence: Synthetic oligonucleotide
acgaacaaaaccctaaccg

SEQ ID NO: 10378 - DNA, 22 bp, Artificial Sequence
  Description of Artificial Sequence: Synthetic oligonucleotide
tcgtttttggcgttaaagatag

SEQ ID NO: 10379 - DNA, 23 bp, Artificial Sequence
  Description of Artificial Sequence: Synthetic oligonucleotide
ataaactcgaactctaaatcccg

SEQ ID NO: 10380 - DNA, 21 bp, Artificial Sequence
  Description of Artificial Sequence: Synthetic oligonucleotide
ctcgaactctaaatcccgttc

SEQ ID NO: 10381 - DNA, 20 bp, Artificial Sequence
  Description of Artificial Sequence: Synthetic oligonucleotide
actaaaaacgccgataccga

SEQ ID NO: 10382 - DNA, 20 bp, Artificial Sequence
  Description of Artificial Sequence: Synthetic oligonucleotide
taaaaacgccgataccgact

SEQ ID NO: 10383 - DNA, 22 bp, Artificial Sequence
  Description of Artificial Sequence: Synthetic oligonucleotide
aattttaagcgtatcgacgttc

SEQ ID NO: 10384 - DNA, 19 bp, Artificial Sequence
  Description of Artificial Sequence: Synthetic oligonucleotide
acgacgaccaacaccctac

SEQ ID NO: 10385 - DNA, 22 bp, Artificial Sequence
  Description of Artificial Sequence: Synthetic oligonucleotide
tatcggttcggagttagattac

SEQ ID NO: 10386 - DNA, 23 bp, Artificial Sequence
  Description of Artificial Sequence: Synthetic oligonucleotide
aaaacccgacatactaaacgaat

SEQ ID NO: 10387 - DNA, 22 bp, Artificial Sequence
  Description of Artificial Sequence: Synthetic oligonucleotide
cgataccgactctatacccgac

SEQ ID NO: 10388 - DNA, 19 bp, Artificial Sequence
  Description of Artificial Sequence: Synthetic oligonucleotide
ccgaaactctctaccgacc

SEQ ID NO: 10389 - DNA, 34 bp, Artificial Sequence
  Description of Artificial Sequence: Synthetic oligonucleotide
attataagtagcgtcgttattgagagtcgttcgg

SEQ ID NO: 10390 - DNA, 20 bp, Artificial Sequence
  Description of Artificial Sequence: Synthetic oligonucleotide
ctctatacccgacgcctacg

SEQ ID NO: 10391 - DNA, 22 bp, Artificial Sequence
  Description of Artificial Sequence: Synthetic oligonucleotide
cggagttagattacgggtttta

SEQ ID NO: 10392 - DNA, 19 bp, Artificial Sequence
  Description of Artificial Sequence: Synthetic oligonucleotide
aaccctcgaccacgtacac

SEQ ID NO: 10393 - DNA, 32 bp, Artificial Sequence
  Description of Artificial Sequence: Synthetic oligonucleotide
agcgtcgttattgagagtcgttcggaattcgt

SEQ ID NO: 10394 - DNA, 19 bp, Artificial Sequence
  Description of Artificial Sequence: Synthetic oligonucleotide
tctatacccgacgcctacg

SEQ ID NO: 10395 - DNA, 19 bp, Artificial Sequence
  Description of Artificial Sequence: Synthetic oligonucleotide
ctaaaaacgccgataccga

SEQ ID NO: 10396 - DNA, 32 bp, Artificial Sequence
  Description of Artificial Sequence: Synthetic oligonucleotide
aagcgtatcgacgttcgcgagttttttttaaa

SEQ ID NO: 10397 - DNA, 32 bp, Artificial Sequence
  Description of Artificial Sequence: Synthetic oligonucleotide
ttttaagcgtatcgacgttcgcgagttttttt

SEQ ID NO: 10398 - DNA, 21 bp, Artificial Sequence
  Description of Artificial Sequence: Synthetic oligonucleotide
gtcgttggtcggtagagagtt

SEQ ID NO: 10399 - DNA, 21 bp, Artificial Sequence
  Description of Artificial Sequence: Synthetic oligonucleotide
gaacgtcgatacgcttaaaat

SEQ ID NO: 10400 - DNA, 26 bp, Artificial Sequence
  Description of Artificial Sequence: Synthetic oligonucleotide
agcgtaggtttggtgcgcgtagagaa

SEQ ID NO: 10401 - DNA, 21 bp, Artificial Sequence
  Description of Artificial Sequence: Synthetic oligonucleotide
aaaacccgacatactaaacga

SEQ ID NO: 10402 - DNA, 22 bp, Artificial Sequence
  Description of Artificial Sequence: Synthetic oligonucleotide
atcttcgacaaaactaaaaacg

SEQ ID NO: 10403 - DNA, 22 bp, Artificial Sequence
  Description of Artificial Sequence: Synthetic oligonucleotide
gtcgggtagttcgttttgtttt

SEQ ID NO: 10404 - DNA, 20 bp, Artificial Sequence
  Description of Artificial Sequence: Synthetic oligonucleotide
gactaacctaacgcgaaccc

SEQ ID NO: 10405 - DNA, 25 bp, Artificial Sequence
  Description of Artificial Sequence: Synthetic oligonucleotide
ttcggaggttcgcgcgttcgcgaag

SEQ ID NO: 10406 - DNA, 20 bp, Artificial Sequence
  Description of Artificial Sequence: Synthetic oligonucleotide
aaactaaaaacgccgatacc

SEQ ID NO: 10407 - DNA, 22 bp, Artificial Sequence
  Description of Artificial Sequence: Synthetic oligonucleotide
atttttgtttttcgtcggttat

SEQ ID NO: 10408 - DNA, 19 bp, Artificial Sequence
  Description of Artificial Sequence: Synthetic oligonucleotide
ccgccactaacgctaaact

SEQ ID NO: 10409 - DNA, 30 bp, Artificial Sequence
  Description of Artificial Sequence: Synthetic oligonucleotide
tgttttttggattttaagcgtttcgcgcgt

SEQ ID NO: 10410 - DNA, 22 bp, Artificial Sequence
  Description of Artificial Sequence: Synthetic oligonucleotide
gtttcggtttgatttagcgtag

SEQ ID NO: 10411 - DNA, 18 bp, Artificial Sequence
  Description of Artificial Sequence: Synthetic oligonucleotide
accgccgcctataaactc

SEQ ID NO: 10412 - DNA, 18 bp, Artificial Sequence
  Description of Artificial Sequence: Synthetic oligonucleotide
gaccgccgcctataaact

SEQ ID NO: 10413 - DNA, 19 bp, Artificial Sequence
  Description of Artificial Sequence: Synthetic oligonucleotide
ggcggaaagtagtcgtttt

SEQ ID NO: 10414 - DNA, 22 bp, Artificial Sequence
  Description of Artificial Sequence: Synthetic oligonucleotide
cactaacgctaaactcctcgac

SEQ ID NO: 10415 - DNA, 22 bp, Artificial Sequence
  Description of Artificial Sequence: Synthetic oligonucleotide
tagtagttcgcgttaggtttcg

SEQ ID NO: 10416 - DNA, 19 bp, Artificial Sequence
  Description of Artificial Sequence: Synthetic oligonucleotide
gcccgaaaatacgaacaaa

SEQ ID NO: 10417 - DNA, 20 bp, Artificial Sequence
  Description of Artificial Sequence: Synthetic oligonucleotide
actctatacccgacgcctac

SEQ ID NO: 10418 - DNA, 18 bp, Artificial Sequence
  Description of Artificial Sequence: Synthetic oligonucleotide
atacccgacgcctacgtt

SEQ ID NO: 10419 - DNA, 21 bp, Artificial Sequence
  Description of Artificial Sequence: Synthetic oligonucleotide
cgggtagttcgttttgttttt

SEQ ID NO: 10420 - DNA, 20 bp, Artificial Sequence
  Description of Artificial Sequence: Synthetic oligonucleotide
gtccgtcccgactaacctaa

SEQ ID NO: 10421 - DNA, 27 bp, Artificial Sequence
  Description of Artificial Sequence: Synthetic oligonucleotide
ttcgcgaaggggacgtagcgaaatcgg

SEQ ID NO: 10422 - DNA, 20 bp, Artificial Sequence
  Description of Artificial Sequence: Synthetic oligonucleotide
gttaggttagtcgggacgga

SEQ ID NO: 10423 - DNA, 21 bp, Artificial Sequence
  Description of Artificial Sequence: Synthetic oligonucleotide
aaatacctacccaacgctacg

SEQ ID NO: 10424 - DNA, 21 bp, Artificial Sequence
  Description of Artificial Sequence: Synthetic oligonucleotide
tttcgcgggcgggggttggag

SEQ ID NO: 10425 - DNA, 23 bp, Artificial Sequence
  Description of Artificial Sequence: Synthetic oligonucleotide
cggagttagattacgggttttat

SEQ ID NO: 10426 - DNA, 19 bp, Artificial Sequence
  Description of Artificial Sequence: Synthetic oligonucleotide
ctcgaccacgtacaccaaa

SEQ ID NO: 10427 - DNA, 21 bp, Artificial Sequence
  Description of Artificial Sequence: Synthetic oligonucleotide
ttggttttcgtaggtcgttag

SEQ ID NO: 10428 - DNA, 21 bp, Artificial Sequence
  Description of Artificial Sequence: Synthetic oligonucleotide
cgtttagtatgtcgggttttt

SEQ ID NO: 10429 - DNA, 23 bp, Artificial Sequence
  Description of Artificial Sequence: Synthetic oligonucleotide
ttcgtttagtatgtcgggttttt

SEQ ID NO: 10430 - DNA, 21 bp, Artificial Sequence
  Description of Artificial Sequence: Synthetic oligonucleotide
tcgggtagttcgttttgtttt

SEQ ID NO: 10431 - DNA, 19 bp, Artificial Sequence
  Description of Artificial Sequence: Synthetic oligonucleotide
tccgtcccgactaacctaa

SEQ ID NO: 10432 - DNA, 19 bp, Artificial Sequence
  Description of Artificial Sequence: Synthetic oligonucleotide
ttaggttagtcgggacgga

SEQ ID NO: 10433 - DNA, 20 bp, Artificial Sequence
  Description of Artificial Sequence: Synthetic oligonucleotide
aggtcgttagtagttcgcgt

SEQ ID NO: 10434 - DNA, 22 bp, Artificial Sequence
  Description of Artificial Sequence: Synthetic oligonucleotide
catctaaactaacaccgaacga

SEQ ID NO: 10435 - DNA, 22 bp, Artificial Sequence
  Description of Artificial Sequence: Synthetic oligonucleotide
gagaacgaggtacgtttttgag

SEQ ID NO: 10436 - DNA, 23 bp, Artificial Sequence
  Description of Artificial Sequence: Synthetic oligonucleotide
tgcggatcgagcgttcgcgtagg

SEQ ID NO: 10437 - DNA, 22 bp, Artificial Sequence
  Description of Artificial Sequence: Synthetic oligonucleotide
aaactaacaccgaacgaaaaat

SEQ ID NO: 10438 - DNA, 23 bp, Artificial Sequence
  Description of Artificial Sequence: Synthetic oligonucleotide
tctaaactaacaccgaacgaaaa

SEQ ID NO: 10439 - DNA, 22 bp, Artificial Sequence
  Description of Artificial Sequence: Synthetic oligonucleotide
atatacgaatcaaccgaaccct

SEQ ID NO: 10440 - DNA, 22 bp, Artificial Sequence
  Description of Artificial Sequence: Synthetic oligonucleotide
atttttacgttttggaaagtcg

SEQ ID NO: 10441 - DNA, 24 bp, Artificial Sequence
  Description of Artificial Sequence: Synthetic oligonucleotide
tggtcgtagcgggttcgcgtttga

SEQ ID NO: 10442 - DNA, 22 bp, Artificial Sequence
  Description of Artificial Sequence: Synthetic oligonucleotide
aaatatacgaatcaaccgaacc

SEQ ID NO: 10443 - DNA, 22 bp, Artificial Sequence
  Description of Artificial Sequence: Synthetic oligonucleotide
gcatctaaactaacaccgaacg

SEQ ID NO: 10444 - DNA, 22 bp, Artificial Sequence
  Description of Artificial Sequence: Synthetic oligonucleotide
gtgagaacgaggtacgtttttg

SEQ ID NO: 10445 - DNA, 22 bp, Artificial Sequence
  Description of Artificial Sequence: Synthetic oligonucleotide
aatatacgaatcaaccgaaccc

SEQ ID NO: 10446 - DNA, 22 bp, Artificial Sequence
  Description of Artificial Sequence: Synthetic oligonucleotide
ctaaactaacaccgaacgaaaa

SEQ ID NO: 10447 - DNA, 21 bp, Artificial Sequence
  Description of Artificial Sequence: Synthetic oligonucleotide
cgcatctaaactaacaccgaa

SEQ ID NO: 10448 - DNA, 22 bp, Artificial Sequence
  Description of Artificial Sequence: Synthetic oligonucleotide
aacgaccaaaatctaacctacg

SEQ ID NO: 10449 - DNA, 21 bp, Artificial Sequence
  Description of Artificial Sequence: Synthetic oligonucleotide
ttttaacggttttcggagttc

SEQ ID NO: 10450 - DNA, 22 bp, Artificial Sequence
  Description of Artificial Sequence: Synthetic oligonucleotide
tggcgttaaaggcggtcggcgt

SEQ ID NO: 10451 - DNA, 21 bp, Artificial Sequence
  Description of Artificial Sequence: Synthetic oligonucleotide
tgagaacgaggtacgtttttg

SEQ ID NO: 10452 - DNA, 23 bp, Artificial Sequence
  Description of Artificial Sequence: Synthetic oligonucleotide
aaaatatacgaatcaaccgaacc

SEQ ID NO: 10453 - DNA, 23 bp, Artificial Sequence
  Description of Artificial Sequence: Synthetic oligonucleotide
atctaaactaacaccgaacgaaa

SEQ ID NO: 10454 - DNA, 23 bp, Artificial Sequence
  Description of Artificial Sequence: Synthetic oligonucleotide
taaactaacaccgaacgaaaaat

SEQ ID NO: 10455 - DNA, 21 bp, Artificial Sequence
  Description of Artificial Sequence: Synthetic oligonucleotide
tatacgaatcaaccgaaccct

SEQ ID NO: 10456 - DNA, 23 bp, Artificial Sequence
  Description of Artificial Sequence: Synthetic oligonucleotide
cgataccgaccttttctattacc

SEQ ID NO: 10457 - DNA, 22 bp, Artificial Sequence
  Description of Artificial Sequence: Synthetic oligonucleotide
ggttcggttgattcgtatattt

SEQ ID NO: 10458 - DNA, 22 bp, Artificial Sequence
  Description of Artificial Sequence: Synthetic oligonucleotide
tgttgggcgtacggggtgggga

SEQ ID NO: 10459 - DNA, 22 bp, Artificial Sequence
  Description of Artificial Sequence: Synthetic oligonucleotide
tttttaacggttttcggagttc

SEQ ID NO: 10460 - DNA, 22 bp, Artificial Sequence
  Description of Artificial Sequence: Synthetic oligonucleotide
tctaaactaacaccgaacgaaa

SEQ ID NO: 10461 - DNA, 22 bp, Artificial Sequence
  Description of Artificial Sequence: Synthetic oligonucleotide
agaacgaggtacgtttttgagt

SEQ ID NO: 10462 - DNA, 21 bp, Artificial Sequence
  Description of Artificial Sequence: Synthetic oligonucleotide
gttttggaaagtcgcgttagt

SEQ ID NO: 10463 - DNA, 23 bp, Artificial Sequence
  Description of Artificial Sequence: Synthetic oligonucleotide
catctaaactaacaccgaacgaa

SEQ ID NO: 10464 - DNA, 21 bp, Artificial Sequence
  Description of Artificial Sequence: Synthetic oligonucleotide
ggaaagtcgcgttagtgaagt

SEQ ID NO: 10465 - DNA, 22 bp, Artificial Sequence
  Description of Artificial Sequence: Synthetic oligonucleotide
gggttcggttgattcgtatatt

SEQ ID NO: 10466 - DNA, 22 bp, Artificial Sequence
  Description of Artificial Sequence: Synthetic oligonucleotide
gacgataccgaccttttctatt

SEQ ID NO: 10467 - DNA, 22 bp, Artificial Sequence
  Description of Artificial Sequence: Synthetic oligonucleotide
aactaacaccgaacgaaaaatc

SEQ ID NO: 10468 - DNA, 22 bp, Artificial Sequence
  Description of Artificial Sequence: Synthetic oligonucleotide
tgagaacgaggtacgtttttga

SEQ ID NO: 10469 - DNA, 22 bp, Artificial Sequence
  Description of Artificial Sequence: Synthetic oligonucleotide
cgacgataccgaccttttctat

SEQ ID NO: 10470 - DNA, 22 bp, Artificial Sequence
  Description of Artificial Sequence: Synthetic oligonucleotide
aaatcctactcgtacctccgaa

SEQ ID NO: 10471 - DNA, 21 bp, Artificial Sequence
  Description of Artificial Sequence: Synthetic oligonucleotide
tattatttattcggtcgggga

SEQ ID NO: 10472 - DNA, 22 bp, Artificial Sequence
  Description of Artificial Sequence: Synthetic oligonucleotide
tggggcgttcgcggggagtaga

SEQ ID NO: 10473 - DNA, 21 bp, Artificial Sequence
  Description of Artificial Sequence: Synthetic oligonucleotide
aatcctactcgtacctccgaa

SEQ ID NO: 10474 - DNA, 21 bp, Artificial Sequence
  Description of Artificial Sequence: Synthetic oligonucleotide
gttggggcgttcgcggggagt

SEQ ID NO: 10475 - DNA, 20 bp, Artificial Sequence
  Description of Artificial Sequence: Synthetic oligonucleotide
cgcgcatctaaactaacacc

SEQ ID NO: 10476 - DNA, 21 bp, Artificial Sequence
  Description of Artificial Sequence: Synthetic oligonucleotide
gagaacgaggtacgtttttga

SEQ ID NO: 10477 - DNA, 22 bp, Artificial Sequence
  Description of Artificial Sequence: Synthetic oligonucleotide
atattcgcgtcctaaataaccc

SEQ ID NO: 10478 - DNA, 20 bp, Artificial Sequence
  Description of Artificial Sequence: Synthetic oligonucleotide
ttgtggagttacggtttcgt

SEQ ID NO: 10479 - DNA, 27 bp, Artificial Sequence
  Description of Artificial Sequence: Synthetic oligonucleotide
aggatttcgcggagagtttttgggggt

SEQ ID NO: 10480 - DNA, 22 bp, Artificial Sequence
  Description of Artificial Sequence: Synthetic oligonucleotide
cgtaatcgaaaaccctaaaaac

SEQ ID NO: 10481 - DNA, 22 bp, Artificial Sequence
  Description of Artificial Sequence: Synthetic oligonucleotide
agatttgcgttaggttaggtcg

SEQ ID NO: 10482 - DNA, 33 bp, Artificial Sequence
  Description of Artificial Sequence: Synthetic oligonucleotide
ttatcggttagcgatattcgtcgtttcgttcgt

SEQ ID NO: 10483 - DNA, 21 bp, Artificial Sequence
  Description of Artificial Sequence: Synthetic oligonucleotide
tttttacgttttggaaagtcg

SEQ ID NO: 10484 - DNA, 21 bp, Artificial Sequence
  Description of Artificial Sequence: Synthetic oligonucleotide
actaacgcgactttccaaaac

SEQ ID NO: 10485 - DNA, 21 bp, Artificial Sequence
  Description of Artificial Sequence: Synthetic oligonucleotide
gagtttcgagcggtttttagt

SEQ ID NO: 10486 - DNA, 30 bp, Artificial Sequence
  Description of Artificial Sequence: Synthetic oligonucleotide
ggggttcgtgatttggtttcgaatcgatgt

SEQ ID NO: 10487 - DNA, 21 bp, Artificial Sequence
  Description of Artificial Sequence: Synthetic oligonucleotide
gatttgcgttaggttaggtcg

SEQ ID NO: 10488 - DNA, 21 bp, Artificial Sequence
  Description of Artificial Sequence: Synthetic oligonucleotide
acttcactaacgcgactttcc

SEQ ID NO: 10489 - DNA, 20 bp, Artificial Sequence
  Description of Artificial Sequence: Synthetic oligonucleotide
tttacgttttggaaagtcgc

SEQ ID NO: 10490 - DNA, 22 bp, Artificial Sequence
  Description of Artificial Sequence: Synthetic oligonucleotide
acgtaatcgaaaaccctaaaaa

SEQ ID NO: 10491 - DNA, 21 bp, Artificial Sequence
  Description of Artificial Sequence: Synthetic oligonucleotide
tgcgttaggttaggtcgaagt

SEQ ID NO: 10492 - DNA, 20 bp, Artificial Sequence
  Description of Artificial Sequence: Synthetic oligonucleotide
gcgttagtgaagttcgtggt

SEQ ID NO: 10493 - DNA, 23 bp, Artificial Sequence
  Description of Artificial Sequence: Synthetic oligonucleotide
gatttttacgttttggaaagtcg

SEQ ID NO: 10494 - DNA, 20 bp, Artificial Sequence
  Description of Artificial Sequence: Synthetic oligonucleotide
atacgaatcaaccgaaccct

SEQ ID NO: 10495 - DNA, 21 bp, Artificial Sequence
  Description of Artificial Sequence: Synthetic oligonucleotide
aaaatcctactcgtacctccg

SEQ ID NO: 10496 - DNA, 34 bp, Artificial Sequence
  Description of Artificial Sequence: Synthetic oligonucleotide
ggcgttcgcggggagtagattcgaggttgggcgt

SEQ ID NO: 10497 - DNA, 23 bp, Artificial Sequence
  Description of Artificial Sequence: Synthetic oligonucleotide
aaacgaccaaaatctaacctacg

SEQ ID NO: 10498 - DNA, 21 bp, Artificial Sequence
  Description of Artificial Sequence: Synthetic oligonucleotide
tttgtggagttacggtttcgt

SEQ ID NO: 10499 - DNA, 21 bp, Artificial Sequence
  Description of Artificial Sequence: Synthetic oligonucleotide
agtttcgagcggtttttagtg

SEQ ID NO: 10500 - DNA, 21 bp, Artificial Sequence
  Description of Artificial Sequence: Synthetic oligonucleotide
ttttacgttttggaaagtcgc

SEQ ID NO: 10501 - DNA, 22 bp, Artificial Sequence
  Description of Artificial Sequence: Synthetic oligonucleotide
atctaaactaacaccgaacgaa

SEQ ID NO: 10502 - DNA, 22 bp, Artificial Sequence
  Description of Artificial Sequence: Synthetic oligonucleotide
aacttcactaacgcgactttcc

SEQ ID NO: 10503 - DNA, 22 bp, Artificial Sequence
  Description of Artificial Sequence: Synthetic oligonucleotide
atacccgaaactacgacgacta

SEQ ID NO: 10504 - DNA, 19 bp, Artificial Sequence
  Description of Artificial Sequence: Synthetic oligonucleotide
gtgtttgtttagcgttgcg

SEQ ID NO: 10505 - DNA, 28 bp, Artificial Sequence
  Description of Artificial Sequence: Synthetic oligonucleotide
agttttcgttcgcggagtcgaatcgttt

SEQ ID NO: 10506 - DNA, 20 bp, Artificial Sequence
  Description of Artificial Sequence: Synthetic oligonucleotide
ttttggaaagtcgcgttagt

SEQ ID NO: 10507 - DNA, 20 bp, Artificial Sequence
  Description of Artificial Sequence: Synthetic oligonucleotide
gcgcatctaaactaacaccg

SEQ ID NO: 10508 - DNA, 21 bp, Artificial Sequence
  Description of Artificial Sequence: Synthetic oligonucleotide
tattcgcgtcctaaataaccc

SEQ ID NO: 10509 - DNA, 20 bp, Artificial Sequence
  Description of Artificial Sequence: Synthetic oligonucleotide
gtggagttacggtttcgttc

SEQ ID NO: 10510 - DNA, 22 bp, Artificial Sequence
  Description of Artificial Sequence: Synthetic oligonucleotide
ctcaaaaacgtacctcgttctc

SEQ ID NO: 10511 - DNA, 19 bp, Artificial Sequence
  Description of Artificial Sequence: Synthetic oligonucleotide
gcggattattagcggtttg

SEQ ID NO: 10512 - DNA, 32 bp, Artificial Sequence
  Description of Artificial Sequence: Synthetic oligonucleotide
gtcgttgtttagggaagaggatcggggttcgg

SEQ ID NO: 10513 - DNA, 19 bp, Artificial Sequence
  Description of Artificial Sequence: Synthetic oligonucleotide
gattattagcggtttgcgg

SEQ ID NO: 10514 - DNA, 19 bp, Artificial Sequence
  Description of Artificial Sequence: Synthetic oligonucleotide
cggattattagcggtttgc

SEQ ID NO: 10515 - DNA, 19 bp, Artificial Sequence
  Description of Artificial Sequence: Synthetic oligonucleotide
gtttggcgcggattattag

SEQ ID NO: 10516 - DNA, 19 bp, Artificial Sequence
  Description of Artificial Sequence: Synthetic oligonucleotide
ggattattagcggtttgcg

SEQ ID NO: 10517 - DNA, 20 bp, Artificial Sequence
  Description of Artificial Sequence: Synthetic oligonucleotide
acgaacttcactaacgcgac

SEQ ID NO: 10518 - DNA, 22 bp, Artificial Sequence
  Description of Artificial Sequence: Synthetic oligonucleotide
tacccgaaactacgacgactac

SEQ ID NO: 10519 - DNA, 21 bp, Artificial Sequence
  Description of Artificial Sequence: Synthetic oligonucleotide
ttgcgttaggttaggtcgaag

SEQ ID NO: 10520 - DNA, 20 bp, Artificial Sequence
  Description of Artificial Sequence: Synthetic oligonucleotide
accacgaacttcactaacgc

SEQ ID NO: 10521 - DNA, 20 bp, Artificial Sequence
  Description of Artificial Sequence: Synthetic oligonucleotide
attatttattcggtcgggga

SEQ ID NO: 10522 - DNA, 19 bp, Artificial Sequence
  Description of Artificial Sequence: Synthetic oligonucleotide
tacgaatcaaccgaaccct

SEQ ID NO: 10523 - DNA, 22 bp, Artificial Sequence
  Description of Artificial Sequence: Synthetic oligonucleotide
ttcggttgattcgtatattttt

SEQ ID NO: 10524 - DNA, 21 bp, Artificial Sequence
  Description of Artificial Sequence: Synthetic oligonucleotide
aaccacgaacttcactaacgc

SEQ ID NO: 10525 - DNA, 22 bp, Artificial Sequence
  Description of Artificial Sequence: Synthetic oligonucleotide
aatcctactcgtacctccgaac

SEQ ID NO: 10526 - DNA, 24 bp, Artificial Sequence
  Description of Artificial Sequence: Synthetic oligonucleotide
ggtaatagaaaaggtcggtatcgt

SEQ ID NO: 10527 - DNA, 37 bp, Artificial Sequence
  Description of Artificial Sequence: Synthetic oligonucleotide
gagtaggacgcgcgcgtattattatttattcggtcgg

SEQ ID NO: 10528 - DNA, 22 bp, Artificial Sequence
  Description of Artificial Sequence: Synthetic oligonucleotide
caaactcaaaaacgtacctcgt

SEQ ID NO: 10529 - DNA, 20 bp, Artificial Sequence
  Description of Artificial Sequence: Synthetic oligonucleotide
cttcactaacgcgactttcc

SEQ ID NO: 10530 - DNA, 23 bp, Artificial Sequence
  Description of Artificial Sequence: Synthetic oligonucleotide
tagatttgcgttaggttaggtcg

SEQ ID NO: 10531 - DNA, 20 bp, Artificial Sequence
  Description of Artificial Sequence: Synthetic oligonucleotide
tttaacggttttcggagttc

SEQ ID NO: 10532 - DNA, 23 bp, Artificial Sequence
  Description of Artificial Sequence: Synthetic oligonucleotide
gttcggttgattcgtatattttt

SEQ ID NO: 10533 - DNA, 20 bp, Artificial Sequence
  Description of Artificial Sequence: Synthetic oligonucleotide
ctaacgcgactttccaaaac

SEQ ID NO: 10534 - DNA, 21 bp, Artificial Sequence
  Description of Artificial Sequence: Synthetic oligonucleotide
tttgcgttaggttaggtcgaa

SEQ ID NO: 10535 - DNA, 20 bp, Artificial Sequence
  Description of Artificial Sequence: Synthetic oligonucleotide
tttggaaagtcgcgttagtg

SEQ ID NO: 10536 - DNA, 22 bp, Artificial Sequence
  Description of Artificial Sequence: Synthetic oligonucleotide
aactcaaaaacgtacctcgttc

SEQ ID NO: 10537 - DNA, 24 bp, Artificial Sequence
  Description of Artificial Sequence: Synthetic oligonucleotide
ctaaactaacaccgaacgaaaaat

SEQ ID NO: 10538 - DNA, 19 bp, Artificial Sequence
  Description of Artificial Sequence: Synthetic oligonucleotide
tggaaagtcgcgttagtga

SEQ ID NO: 10539 - DNA, 21 bp, Artificial Sequence
  Description of Artificial Sequence: Synthetic oligonucleotide
agaacgaggtacgtttttgag

SEQ ID NO: 10540 - DNA, 24 bp, Artificial Sequence
  Description of Artificial Sequence: Synthetic oligonucleotide
acgataccgaccttttctattacc

SEQ ID NO: 10541 - DNA, 22 bp, Artificial Sequence
  Description of Artificial Sequence: Synthetic oligonucleotide
aaaaatatacgaatcaaccgaa

SEQ ID NO: 10542 - DNA, 19 bp, Artificial Sequence
  Description of Artificial Sequence: Synthetic oligonucleotide
cgcgttagtgaagttcgtg

SEQ ID NO: 10543 - DNA, 20 bp, Artificial Sequence
  Description of Artificial Sequence: Synthetic oligonucleotide
ggtgagaacgaggtacgttt

SEQ ID NO: 10544 - DNA, 20 bp, Artificial Sequence
  Description of Artificial Sequence: Synthetic oligonucleotide
gtttcgagcggtttttagtg

SEQ ID NO: 10545 - DNA, 21 bp, Artificial Sequence
  Description of Artificial Sequence: Synthetic oligonucleotide
cgaacttcactaacgcgactt

SEQ ID NO: 10546 - DNA, 24 bp, Artificial Sequence
  Description of Artificial Sequence: Synthetic oligonucleotide
tcggttgattcgtatatttttatg

SEQ ID NO: 10547 - DNA, 21 bp, Artificial Sequence
  Description of Artificial Sequence: Synthetic oligonucleotide
atataacccgcctaaaaaccg

SEQ ID NO: 10548 - DNA, 21 bp, Artificial Sequence
  Description of Artificial Sequence: Synthetic oligonucleotide
gtcgtcgtagtttcgggtatc

SEQ ID NO: 10549 - DNA, 21 bp, Artificial Sequence
  Description of Artificial Sequence: Synthetic oligonucleotide
ggcgcgcgagttttcgggcgg

SEQ ID NO: 10550 - DNA, 23 bp, Artificial Sequence
  Description of Artificial Sequence: Synthetic oligonucleotide
gtaatagaaaaggtcggtatcgt

SEQ ID NO: 10551 - DNA, 21 bp, Artificial Sequence
  Description of Artificial Sequence: Synthetic oligonucleotide
gaacttcactaacgcgacttt

SEQ ID NO: 10552 - DNA, 24 bp, Artificial Sequence
  Description of Artificial Sequence: Synthetic oligonucleotide
cggttgattcgtatatttttatgg

SEQ ID NO: 10553 - DNA, 22 bp, Artificial Sequence
  Description of Artificial Sequence: Synthetic oligonucleotide
ctaaactcgcaactccgaaact

SEQ ID NO: 10554 - DNA, 20 bp, Artificial Sequence
  Description of Artificial Sequence: Synthetic oligonucleotide
tggtcgttttagtttttcgc

SEQ ID NO: 10555 - DNA, 32 bp, Artificial Sequence
  Description of Artificial Sequence: Synthetic oligonucleotide
aggggtcgatttaatttcgagggagtttttgt

SEQ ID NO: 10556 - DNA, 22 bp, Artificial Sequence
  Description of Artificial Sequence: Synthetic oligonucleotide
gaaaccacgaacttcactaacg

SEQ ID NO: 10557 - DNA, 20 bp, Artificial Sequence
  Description of Artificial Sequence: Synthetic oligonucleotide
gagtttcgagcggtttttag

SEQ ID NO: 10558 - DNA, 20 bp, Artificial Sequence
  Description of Artificial Sequence: Synthetic oligonucleotide
atttgcgttaggttaggtcg

SEQ ID NO: 10559 - DNA, 21 bp, Artificial Sequence
  Description of Artificial Sequence: Synthetic oligonucleotide
ccgaaactacgacgactacaa

SEQ ID NO: 10560 - DNA, 22 bp, Artificial Sequence
  Description of Artificial Sequence: Synthetic oligonucleotide
cgactttccaaaacgtaaaaat

SEQ ID NO: 10561 - DNA, 19 bp, Artificial Sequence
  Description of Artificial Sequence: Synthetic oligonucleotide
attcgatatgttgggcgag

SEQ ID NO: 10562 - DNA, 25 bp, Artificial Sequence
  Description of Artificial Sequence: Synthetic oligonucleotide
agcggtttttagtggcggcgttgtt

SEQ ID NO: 10563 - DNA, 21 bp, Artificial Sequence
  Description of Artificial Sequence: Synthetic oligonucleotide
taaactcgcaactccgaaact

SEQ ID NO: 10564 - DNA, 22 bp, Artificial Sequence
  Description of Artificial Sequence: Synthetic oligonucleotide
caaaaacgtacctcgttctcac

SEQ ID NO: 10565 - DNA, 19 bp, Artificial Sequence
  Description of Artificial Sequence: Synthetic oligonucleotide
caaaaactctccgcgaaat

SEQ ID NO: 10566 - DNA, 21 bp, Artificial Sequence
  Description of Artificial Sequence: Synthetic oligonucleotide
cgtcgttttaggtttaggagg

SEQ ID NO: 10567 - DNA, 30 bp, Artificial Sequence
  Description of Artificial Sequence: Synthetic oligonucleotide
aggggaacggttgtttttcgttaagtaggg

SEQ ID NO: 10568 - DNA, 19 bp, Artificial Sequence
  Description of Artificial Sequence: Synthetic oligonucleotide
cctcgccgaactctacaaa

SEQ ID NO: 10569 - DNA, 22 bp, Artificial Sequence
  Description of Artificial Sequence: Synthetic oligonucleotide
ttttagttggtcgcgtttaagt

SEQ ID NO: 10570 - DNA, 23 bp, Artificial Sequence
  Description of Artificial Sequence: Synthetic oligonucleotide
gtcggggtttcgggcgcgttttg

SEQ ID NO: 10571 - DNA, 22 bp, Artificial Sequence
  Description of Artificial Sequence: Synthetic oligonucleotide
atttcgcaaactcaaaaacgta

SEQ ID NO: 10572 - DNA, 21 bp, Artificial Sequence
  Description of Artificial Sequence: Synthetic oligonucleotide
gcgtcgttttaggtttaggag

SEQ ID NO: 10573 - DNA, 23 bp, Artificial Sequence
  Description of Artificial Sequence: Synthetic oligonucleotide
agggttcggttgattcgtatatt

SEQ ID NO: 10574 - DNA, 24 bp, Artificial Sequence
  Description of Artificial Sequence: Synthetic oligonucleotide
cataaaaatatacgaatcaaccga

SEQ ID NO: 10575 - DNA, 23 bp, Artificial Sequence
  Description of Artificial Sequence: Synthetic oligonucleotide
gggttcgcgtttgacggggaggg

SEQ ID NO: 10576 - DNA, 20 bp, Artificial Sequence
  Description of Artificial Sequence: Synthetic oligonucleotide
attcgcgtcctaaataaccc

SEQ ID NO: 10577 - DNA, 21 bp, Artificial Sequence
  Description of Artificial Sequence: Synthetic oligonucleotide
gaacgaggtacgtttttgagt

SEQ ID NO: 10578 - DNA, 21 bp, Artificial Sequence
  Description of Artificial Sequence: Synthetic oligonucleotide
ttggtcgttttagtttttcgc

SEQ ID NO: 10579 - DNA, 24 bp, Artificial Sequence
  Description of Artificial Sequence: Synthetic oligonucleotide
ccataaaaatatacgaatcaaccg

SEQ ID NO: 10580 - DNA, 20 bp, Artificial Sequence
  Description of Artificial Sequence: Synthetic oligonucleotide
ttggaaagtcgcgttagtga

SEQ ID NO: 10581 - DNA, 21 bp, Artificial Sequence
  Description of Artificial Sequence: Synthetic oligonucleotide
atacccgaaactacgacgact

SEQ ID NO: 10582 - DNA, 19 bp, Artificial Sequence
  Description of Artificial Sequence: Synthetic oligonucleotide
tgtttgtttagcgttgcgt

SEQ ID NO: 10583 - DNA, 18 bp, Artificial Sequence
  Description of Artificial Sequence: Synthetic oligonucleotide
aaactctccgcgaaatcc

SEQ ID NO: 10584 - DNA, 22 bp, Artificial Sequence
  Description of Artificial Sequence: Synthetic oligonucleotide
cggttgtttttcgttaagtagg

SEQ ID NO: 10585 - DNA, 34 bp, Artificial Sequence
  Description of Artificial Sequence: Synthetic oligonucleotide
attttttttgtggagttacggtttcgttcggtag

SEQ ID NO: 10586 - DNA, 19 bp, Artificial Sequence
  Description of Artificial Sequence: Synthetic oligonucleotide
ttatttattcggtcgggga

SEQ ID NO: 10587 - DNA, 26 bp, Artificial Sequence
  Description of Artificial Sequence: Synthetic oligonucleotide
ttcgcggggagtagattcgaggttgg

SEQ ID NO: 10588 - DNA, 21 bp, Artificial Sequence
  Description of Artificial Sequence: Synthetic oligonucleotide
acccgaaactacgacgactac

SEQ ID NO: 10589 - DNA, 21 bp, Artificial Sequence
  Description of Artificial Sequence: Synthetic oligonucleotide
acgaccaaaatctaacctacg

SEQ ID NO: 10590 - DNA, 19 bp, Artificial Sequence
  Description of Artificial Sequence: Synthetic oligonucleotide
aaaactctccgcgaaatcc

SEQ ID NO: 10591 - DNA, 35 bp, Artificial Sequence
  Description of Artificial Sequence: Synthetic oligonucleotide
agcgttaagttttaggggtcgatttaatttcgagg

SEQ ID NO: 10592 - DNA, 19 bp, Artificial Sequence
  Description of Artificial Sequence: Synthetic oligonucleotide
tcactaacgcgactttcca

SEQ ID NO: 10593 - DNA, 20 bp, Artificial Sequence
  Description of Artificial Sequence: Synthetic oligonucleotide
gcaaacgtcgaacacaaaat

SEQ ID NO: 10594 - DNA, 21 bp, Artificial Sequence
  Description of Artificial Sequence: Synthetic oligonucleotide
acgtagggtcgaagtaggttc

SEQ ID NO: 10595 - DNA, 29 bp, Artificial Sequence
  Description of Artificial Sequence: Synthetic oligonucleotide
atcgcgattttcggtagagttggggacgt

SEQ ID NO: 10596 - DNA, 19 bp, Artificial Sequence
  Description of Artificial Sequence: Synthetic oligonucleotide
ctcgccgaactctacaaaa

SEQ ID NO: 10597 - DNA, 19 bp, Artificial Sequence
  Description of Artificial Sequence: Synthetic oligonucleotide
ctaataatccgcgccaaac

SEQ ID NO: 10598 - DNA, 22 bp, Artificial Sequence
  Description of Artificial Sequence: Synthetic oligonucleotide
tcggaggtacgagtaggatttt

SEQ ID NO: 10599 - DNA, 29 bp, Artificial Sequence
  Description of Artificial Sequence: Synthetic oligonucleotide
taggcggggatgttagggtttgcgcgatt

SEQ ID NO: 10600 - DNA, 22 bp, Artificial Sequence
  Description of Artificial Sequence: Synthetic oligonucleotide
ttcggaggtacgagtaggattt

SEQ ID NO: 10601 - DNA, 20 bp, Artificial Sequence
  Description of Artificial Sequence: Synthetic oligonucleotide
cgtcctactccgacgatacc

SEQ ID NO: 10602 - DNA, 21 bp, Artificial Sequence
  Description of Artificial Sequence: Synthetic oligonucleotide
aaaacgtacctcgttctcacc

SEQ ID NO: 10603 - DNA, 21 bp, Artificial Sequence
  Description of Artificial Sequence: Synthetic oligonucleotide
gaaatcctctaccgaacgaaa

SEQ ID NO: 10604 - DNA, 19 bp, Artificial Sequence
  Description of Artificial Sequence: Synthetic oligonucleotide
gggcgtcgttttaggttta

SEQ ID NO: 10605 - DNA, 20 bp, Artificial Sequence
  Description of Artificial Sequence: Synthetic oligonucleotide
tataacccgcctaaaaaccg

SEQ ID NO: 10606 - DNA, 22 bp, Artificial Sequence
  Description of Artificial Sequence: Synthetic oligonucleotide
agtcgtcgtagtttcgggtatc

SEQ ID NO: 10607 - DNA, 22 bp, Artificial Sequence
  Description of Artificial Sequence: Synthetic oligonucleotide
gatacccgaaactacgacgact

SEQ ID NO: 10608 - DNA, 29 bp, Artificial Sequence
  Description of Artificial Sequence: Synthetic oligonucleotide
ttcgttcgcggagtcgaatcgtttttcgg

SEQ ID NO: 10609 - DNA, 19 bp, Artificial Sequence
  Description of Artificial Sequence: Synthetic oligonucleotide
cctactccgacgataccga

SEQ ID NO: 10610 - DNA, 21 bp, Artificial Sequence
  Description of Artificial Sequence: Synthetic oligonucleotide
tctaaactaacaccgaacgaa

SEQ ID NO: 10611 - DNA, 20 bp, Artificial Sequence
  Description of Artificial Sequence: Synthetic oligonucleotide
tcgtcgtagtttcgggtatc

SEQ ID NO: 10612 - DNA, 20 bp, Artificial Sequence
  Description of Artificial Sequence: Synthetic oligonucleotide
gcgtcctactccgacgatac

SEQ ID NO: 10613 - DNA, 18 bp, Artificial Sequence
  Description of Artificial Sequence: Synthetic oligonucleotide
acgaatcaaccgaaccct

SEQ ID NO: 10614 - DNA, 19 bp, Artificial Sequence
  Description of Artificial Sequence: Synthetic oligonucleotide
tcgatatgttgggcgagtt

SEQ ID NO: 10615 - DNA, 30 bp, Artificial Sequence
  Description of Artificial Sequence: Synthetic oligonucleotide
ttagtggcggcgttgtttatggtttgatgt

SEQ ID NO: 10616 - DNA, 19 bp, Artificial Sequence
  Description of Artificial Sequence: Synthetic oligonucleotide
ttcgatatgttgggcgagt

SEQ ID NO: 10617 - DNA, 21 bp, Artificial Sequence
  Description of Artificial Sequence: Synthetic oligonucleotide
atcctactcgtacctccgaac

SEQ ID NO: 10618 - DNA, 19 bp, Artificial Sequence
  Description of Artificial Sequence: Synthetic oligonucleotide
ccgaacctacttcgaccct

SEQ ID NO: 10619 - DNA, 22 bp, Artificial Sequence
  Description of Artificial Sequence: Synthetic oligonucleotide
tttagttggtcgcgtttaagtc

SEQ ID NO: 10620 - DNA, 29 bp, Artificial Sequence
  Description of Artificial Sequence: Synthetic oligonucleotide
gtcgtttttgtagagttcggcgaggtcgt

SEQ ID NO: 10621 - DNA, 21 bp, Artificial Sequence
  Description of Artificial Sequence: Synthetic oligonucleotide
cactaaaaaccgctcgaaact

SEQ ID NO: 10622 - DNA, 20 bp, Artificial Sequence
  Description of Artificial Sequence: Synthetic oligonucleotide
ggttagcgatattcgtcgtt

SEQ ID NO: 10623 - DNA, 37 bp, Artificial Sequence
  Description of Artificial Sequence: Synthetic oligonucleotide
aggttatcggggtttttagggttttcgattacgtata

SEQ ID NO: 10624 - DNA, 23 bp, Artificial Sequence
  Description of Artificial Sequence: Synthetic oligonucleotide
taaaaatatacgaatcaaccgaa

SEQ ID NO: 10625 - DNA, 22 bp, Artificial Sequence
  Description of Artificial Sequence: Synthetic oligonucleotide
tttttagttggtcgcgtttaag

SEQ ID NO: 10626 - DNA, 18 bp, Artificial Sequence
  Description of Artificial Sequence: Synthetic oligonucleotide
tttggcgcggattattag

SEQ ID NO: 10627 - DNA, 22 bp, Artificial Sequence
  Description of Artificial Sequence: Synthetic oligonucleotide
accgctaactaaacaaaacgaa

SEQ ID NO: 10628 - DNA, 18 bp, Artificial Sequence
  Description of Artificial Sequence: Synthetic oligonucleotide
agcgttcgcgtaggagtt

SEQ ID NO: 10629 - DNA, 37 bp, Artificial Sequence
  Description of Artificial Sequence: Synthetic oligonucleotide
ttcggtgttagtttagatgcgcgcgggtgatgaacgg

SEQ ID NO: 10630 - DNA, 18 bp, Artificial Sequence
  Description of Artificial Sequence: Synthetic oligonucleotide
aaaaaccctaacgccgaa

SEQ ID NO: 10631 - DNA, 19 bp, Artificial Sequence
  Description of Artificial Sequence: Synthetic oligonucleotide
tagtggcggcgttgtttat

SEQ ID NO: 10632 - DNA, 18 bp, Artificial Sequence
  Description of Artificial Sequence: Synthetic oligonucleotide
gccgaacctacttcgacc

SEQ ID NO: 10633 - DNA, 22 bp, Artificial Sequence
  Description of Artificial Sequence: Synthetic oligonucleotide
gaacggttgtttttcgttaagt

SEQ ID NO: 10634 - DNA, 22 bp, Artificial Sequence
  Description of Artificial Sequence: Synthetic oligonucleotide
acctaacgcaaatctaatacgc

SEQ ID NO: 10635 - DNA, 18 bp, Artificial Sequence
  Description of Artificial Sequence: Synthetic oligonucleotide
ttttcggtcgtcgtttgt

SEQ ID NO: 10636 - DNA, 20 bp, Artificial Sequence
  Description of Artificial Sequence: Synthetic oligonucleotide
gttcgcgggcgtcggtgcgt

SEQ ID NO: 10637 - DNA, 20 bp, Artificial Sequence
  Description of Artificial Sequence: Synthetic oligonucleotide
ttcactaacgcgactttcca

SEQ ID NO: 10638 - DNA, 22 bp, Artificial Sequence
  Description of Artificial Sequence: Synthetic oligonucleotide
cgaaactacgacgactacaaat

SEQ ID NO: 10639 - DNA, 23 bp, Artificial Sequence
  Description of Artificial Sequence: Synthetic oligonucleotide
cataaaaatatacgaatcaaccg

SEQ ID NO: 10640 - DNA, 21 bp, Artificial Sequence
  Description of Artificial Sequence: Synthetic oligonucleotide
tttcgcaaactcaaaaacgta

SEQ ID NO: 10641 - DNA, 19 bp, Artificial Sequence
  Description of Artificial Sequence: Synthetic oligonucleotide
aaaacgcgaatcctaccct

SEQ ID NO: 10642 - DNA, 21 bp, Artificial Sequence
  Description of Artificial Sequence: Synthetic oligonucleotide
tttttaacggttttcggagtt

SEQ ID NO: 10643 - DNA, 19 bp, Artificial Sequence
  Description of Artificial Sequence: Synthetic oligonucleotide
cactaacgcgactttccaa

SEQ ID NO: 10644 - DNA, 18 bp, Artificial Sequence
  Description of Artificial Sequence: Synthetic oligonucleotide
cgcggattattagcggtt

SEQ ID NO: 10645 - DNA, 21 bp, Artificial Sequence
  Description of Artificial Sequence: Synthetic oligonucleotide
actaacaccgaacgaaaaatc

SEQ ID NO: 10646 - DNA, 20 bp, Artificial Sequence
  Description of Artificial Sequence: Synthetic oligonucleotide
gcgttaggttaggtcgaagt

SEQ ID NO: 10647 - DNA, 22 bp, Artificial Sequence
  Description of Artificial Sequence: Synthetic oligonucleotide
aaaaacgtacctcgttctcacc

SEQ ID NO: 10648 - DNA, 20 bp, Artificial Sequence
  Description of Artificial Sequence: Synthetic oligonucleotide
gtcgcgttagtgaagttcgt

SEQ ID NO: 10649 - DNA, 21 bp, Artificial Sequence
  Description of Artificial Sequence: Synthetic oligonucleotide
cgttagtgaagttcgtggttt

SEQ ID NO: 10650 - DNA, 21 bp, Artificial Sequence
  Description of Artificial Sequence: Synthetic oligonucleotide
agtcgcgttagtgaagttcgt

SEQ ID NO: 10651 - DNA, 21 bp, Artificial Sequence
  Description of Artificial Sequence: Synthetic oligonucleotide
cggaggtacgagtaggatttt

SEQ ID NO: 10652 - DNA, 19 bp, Artificial Sequence
  Description of Artificial Sequence: Synthetic oligonucleotide
tgtggagttacggtttcgt

SEQ ID NO: 10653 - DNA, 18 bp, Artificial Sequence
  Description of Artificial Sequence: Synthetic oligonucleotide
taacccgcctaaaaaccg

SEQ ID NO: 10654 - DNA, 22 bp, Artificial Sequence
  Description of Artificial Sequence: Synthetic oligonucleotide
gtagtcgtcgtagtttcgggta

SEQ ID NO: 10655 - DNA, 19 bp, Artificial Sequence
  Description of Artificial Sequence: Synthetic oligonucleotide
gcgtcctactccgacgata

SEQ ID NO: 10656 - DNA, 19 bp, Artificial Sequence
  Description of Artificial Sequence: Synthetic oligonucleotide
gattcgatatgttgggcga

SEQ ID NO: 10657 - DNA, 20 bp, Artificial Sequence
  Description of Artificial Sequence: Synthetic oligonucleotide
atcctactcgtacctccgaa

SEQ ID NO: 10658 - DNA, 19 bp, Artificial Sequence
  Description of Artificial Sequence: Synthetic oligonucleotide
attattagcggtttgcggg

SEQ ID NO: 10659 - DNA, 20 bp, Artificial Sequence
  Description of Artificial Sequence: Synthetic oligonucleotide
taaactcgcaactccgaaac

SEQ ID NO: 10660 - DNA, 21 bp, Artificial Sequence
  Description of Artificial Sequence: Synthetic oligonucleotide
cgtaggttagattttggtcgt

SEQ ID NO: 10661 - DNA, 18 bp, Artificial Sequence
  Description of Artificial Sequence: Synthetic oligonucleotide
cctcgccgaactctacaa

SEQ ID NO: 10662 - DNA, 21 bp, Artificial Sequence
  Description of Artificial Sequence: Synthetic oligonucleotide
ctaaactcgcaactccgaaac

SEQ ID NO: 10663 - DNA, 20 bp, Artificial Sequence
  Description of Artificial Sequence: Synthetic oligonucleotide
aaactcgcaactccgaaact

SEQ ID NO: 10664 - DNA, 19 bp, Artificial Sequence
  Description of Artificial Sequence: Synthetic oligonucleotide
aaaaactctccgcgaaatc

SEQ ID NO: 10665 - DNA, 22 bp, Artificial Sequence
  Description of Artificial Sequence: Synthetic oligonucleotide
tcaaaaacgtacctcgttctca

SEQ ID NO: 10666 - DNA, 23 bp, Artificial Sequence
  Description of Artificial Sequence: Synthetic oligonucleotide
aaactcaaaaacgtacctcgttc

SEQ ID NO: 10667 - DNA, 19 bp, Artificial Sequence
  Description of Artificial Sequence: Synthetic oligonucleotide
actctccgcgaaatcctct

SEQ ID NO: 10668 - DNA, 19 bp, Artificial Sequence
  Description of Artificial Sequence: Synthetic oligonucleotide
acctaaactcgcaactccg

SEQ ID NO: 10669 - DNA, 20 bp, Artificial Sequence
  Description of Artificial Sequence: Synthetic oligonucleotide
aaaaacgcgaatcctaccct

SEQ ID NO: 10670 - DNA, 19 bp, Artificial Sequence
  Description of Artificial Sequence: Synthetic oligonucleotide
cgatatgttgggcgagttt

SEQ ID NO: 10671 - DNA, 20 bp, Artificial Sequence
  Description of Artificial Sequence: Synthetic oligonucleotide
gagggttcggttgattcgta

SEQ ID NO: 10672 - DNA, 18 bp, Artificial Sequence
  Description of Artificial Sequence: Synthetic oligonucleotide
ctctccgcgaaatcctct

SEQ ID NO: 10673 - DNA, 24 bp, Artificial Sequence
  Description of Artificial Sequence: Synthetic oligonucleotide
aaaacgaccaaaatctaacctacg

SEQ ID NO: 10674 - DNA, 23 bp, Artificial Sequence
  Description of Artificial Sequence: Synthetic oligonucleotide
actcaaaaacgtacctcgttctc

SEQ ID NO: 10675 - DNA, 19 bp, Artificial Sequence
  Description of Artificial Sequence: Synthetic oligonucleotide
ataaacaacgccgccacta

SEQ ID NO: 10676 - DNA, 22 bp, Artificial Sequence
  Description of Artificial Sequence: Synthetic oligonucleotide
gtttttagggttttcgattacg

SEQ ID NO: 10677 - DNA, 29 bp, Artificial Sequence
  Description of Artificial Sequence: Synthetic oligonucleotide
gggattcgatatgttgggcgagtttcgag

SEQ ID NO: 10678 - DNA, 22 bp, Artificial Sequence
  Description of Artificial Sequence: Synthetic oligonucleotide
acgttcttactcgctctctacc

SEQ ID NO: 10679 - DNA, 20 bp, Artificial Sequence
  Description of Artificial Sequence: Synthetic oligonucleotide
gttcggacgtgtgttgtttc

SEQ ID NO: 10680 - DNA, 28 bp, Artificial Sequence
  Description of Artificial Sequence: Synthetic oligonucleotide
ggtagtagagggcggggagtattttcgg

SEQ ID NO: 10681 - DNA, 19 bp, Artificial Sequence
  Description of Artificial Sequence: Synthetic oligonucleotide
ttcggacgtgtgttgtttc

SEQ ID NO: 10682 - DNA, 20 bp, Artificial Sequence
  Description of Artificial Sequence: Synthetic oligonucleotide
cgtgtgttgtttcgggttta

SEQ ID NO: 10683 - DNA, 19 bp, Artificial Sequence
  Description of Artificial Sequence: Synthetic oligonucleotide
acgtgtgttgtttcgggtt

SEQ ID NO: 10684 - DNA, 19 bp, Artificial Sequence
  Description of Artificial Sequence: Synthetic oligonucleotide
cgccttattacccataccg

SEQ ID NO: 10685 - DNA, 21 bp, Artificial Sequence
  Description of Artificial Sequence: Synthetic oligonucleotide
ttttcgttttgaatttacggg

SEQ ID NO: 10686 - DNA, 23 bp, Artificial Sequence
  Description of Artificial Sequence: Synthetic oligonucleotide
gggttttcgggggaggcggatgt

SEQ ID NO: 10687 - DNA, 18 bp, Artificial Sequence
  Description of Artificial Sequence: Synthetic oligonucleotide
ggttcggacgtgtgttgt

SEQ ID NO: 10688 - DNA, 18 bp, Artificial Sequence
  Description of Artificial Sequence: Synthetic oligonucleotide
gttggttcggacgtgtgt

SEQ ID NO: 10689 - DNA, 20 bp, Artificial Sequence
  Description of Artificial Sequence: Synthetic oligonucleotide
tttcgttttgaatttacggg

SEQ ID NO: 10690 - DNA, 15 bp, Artificial Sequence
  Description of Artificial Sequence: Synthetic oligonucleotide
cgccaatcccccgta

SEQ ID NO: 10691 - DNA, 17 bp, Artificial Sequence
  Description of Artificial Sequence: Synthetic oligonucleotide
cggggtgagtatttcgc

SEQ ID NO: 10692 - DNA, 23 bp, Artificial Sequence
  Description of Artificial Sequence: Synthetic oligonucleotide
ggagcgagtttcgcggaggtggt

SEQ ID NO: 10693 - DNA, 22 bp, Artificial Sequence
  Description of Artificial Sequence: Synthetic oligonucleotide
tatacgcgatttacggtagagg

SEQ ID NO: 10694 - DNA, 22 bp, Artificial Sequence
  Description of Artificial Sequence: Synthetic oligonucleotide
aactctaaacgctcaaacgaac

SEQ ID NO: 10695 - DNA, 28 bp, Artificial Sequence
  Description of Artificial Sequence: Synthetic oligonucleotide
tgcgtttcgtcgagagttttttgtgggt

SEQ ID NO: 10696 - DNA, 22 bp, Artificial Sequence
  Description of Artificial Sequence: Synthetic oligonucleotide
gtcgttcgggttaagtgataaa

SEQ ID NO: 10697 - DNA, 21 bp, Artificial Sequence
  Description of Artificial Sequence: Synthetic oligonucleotide
gactctactcgatacccgctc

SEQ ID NO: 10698 - DNA, 29 bp, Artificial Sequence
  Description of Artificial Sequence: Synthetic oligonucleotide
ggagtcggtttcgtagtcgttgatagggt

SEQ ID NO: 10699 - DNA, 22 bp, Artificial Sequence
  Description of Artificial Sequence: Synthetic oligonucleotide
gttcgtttgagcgtttagagtt

SEQ ID NO: 10700 - DNA, 21 bp, Artificial Sequence
  Description of Artificial Sequence: Synthetic oligonucleotide
cgtaactaacgacccgaaaat

SEQ ID NO: 10701 - DNA, 24 bp, Artificial Sequence
  Description of Artificial Sequence: Synthetic oligonucleotide
agggttcgcggtttttgtgtgcgg

SEQ ID NO: 10702 - DNA, 21 bp, Artificial Sequence
  Description of Artificial Sequence: Synthetic oligonucleotide
ctaaacgctcaaacgaacaaa

SEQ ID NO: 10703 - DNA, 21 bp, Artificial Sequence
  Description of Artificial Sequence: Synthetic oligonucleotide
atacgcgatttacggtagagg

SEQ ID NO: 10704 - DNA, 21 bp, Artificial Sequence
  Description of Artificial Sequence: Synthetic oligonucleotide
cgggaggagtcgtaaataaac

SEQ ID NO: 10705 - DNA, 22 bp, Artificial Sequence
  Description of Artificial Sequence: Synthetic oligonucleotide
taacaaacgtctaaaaatcgcc

SEQ ID NO: 10706 - DNA, 27 bp, Artificial Sequence
  Description of Artificial Sequence: Synthetic oligonucleotide
gtcgaagcgggcgagcgtggggttcgg

SEQ ID NO: 10707 - DNA, 22 bp, Artificial Sequence
  Description of Artificial Sequence: Synthetic oligonucleotide
cgcgtaacaaacgtctaaaaat

SEQ ID NO: 10708 - DNA, 26 bp, Artificial Sequence
  Description of Artificial Sequence: Synthetic oligonucleotide
agcgggcgagcgtggggttcggtcgg

SEQ ID NO: 10709 - DNA, 22 bp, Artificial Sequence
  Description of Artificial Sequence: Synthetic oligonucleotide
tcgggaggagtcgtaaataaac

SEQ ID NO: 10710 - DNA, 21 bp, Artificial Sequence
  Description of Artificial Sequence: Synthetic oligonucleotide
taaacgctcaaacgaacaaaa

SEQ ID NO: 10711 - DNA, 21 bp, Artificial Sequence
  Description of Artificial Sequence: Synthetic oligonucleotide
ttcgggaggagtcgtaaataa

SEQ ID NO: 10712 - DNA, 21 bp, Artificial Sequence
  Description of Artificial Sequence: Synthetic oligonucleotide
tttcgggaggagtcgtaaata

SEQ ID NO: 10713 - DNA, 22 bp, Artificial Sequence
  Description of Artificial Sequence: Synthetic oligonucleotide
tcgaataaggcgaatttatttt

SEQ ID NO: 10714 - DNA, 21 bp, Artificial Sequence
  Description of Artificial Sequence: Synthetic oligonucleotide
cgtttatttacgactcctccc

SEQ ID NO: 10715 - DNA, 34 bp, Artificial Sequence
  Description of Artificial Sequence: Synthetic oligonucleotide
gggcgtggtttgttagcgttattttttaattggt

SEQ ID NO: 10716 - DNA, 21 bp, Artificial Sequence
  Description of Artificial Sequence: Synthetic oligonucleotide
gtttatttacgactcctcccg

SEQ ID NO: 10717 - DNA, 21 bp, Artificial Sequence
  Description of Artificial Sequence: Synthetic oligonucleotide
actctactcgatacccgctca

SEQ ID NO: 10718 - DNA, 20 bp, Artificial Sequence
  Description of Artificial Sequence: Synthetic oligonucleotide
ctactcgatacccgctcaaa

SEQ ID NO: 10719 - DNA, 20 bp, Artificial Sequence
  Description of Artificial Sequence: Synthetic oligonucleotide
ctctactcgatacccgctca

SEQ ID NO: 10720 - DNA, 20 bp, Artificial Sequence
  Description of Artificial Sequence: Synthetic oligonucleotide
tacgcgatttacggtagagg

SEQ ID NO: 10721 - DNA, 22 bp, Artificial Sequence
  Description of Artificial Sequence: Synthetic oligonucleotide
tgttcgtttgagcgtttagagt

SEQ ID NO: 10722 - DNA, 22 bp, Artificial Sequence
  Description of Artificial Sequence: Synthetic oligonucleotide
tcgttcgggttaagtgataaag

SEQ ID NO: 10723 - DNA, 22 bp, Artificial Sequence
  Description of Artificial Sequence: Synthetic oligonucleotide
tctaaacgctcaaacgaacaaa

SEQ ID NO: 10724 - DNA, 22 bp, Artificial Sequence
  Description of Artificial Sequence: Synthetic oligonucleotide
ttttcgggaggagtcgtaaata

SEQ ID NO: 10725 - DNA, 21 bp, Artificial Sequence
  Description of Artificial Sequence: Synthetic oligonucleotide
tttgttcgtttgagcgtttag

SEQ ID NO: 10726 - DNA, 20 bp, Artificial Sequence
  Description of Artificial Sequence: Synthetic oligonucleotide
gttcgtgattggtttcgttc

SEQ ID NO: 10727 - DNA, 23 bp, Artificial Sequence
  Description of Artificial Sequence: Synthetic oligonucleotide
aaactctaaacgctcaaacgaac

SEQ ID NO: 10728 - DNA, 22 bp, Artificial Sequence
  Description of Artificial Sequence: Synthetic oligonucleotide
cgaataaggcgaatttattttt

SEQ ID NO: 10729 - DNA, 22 bp, Artificial Sequence
  Description of Artificial Sequence: Synthetic oligonucleotide
cgtttgagagtttgtagtcggt

SEQ ID NO: 10730 - DNA, 20 bp, Artificial Sequence
  Description of Artificial Sequence: Synthetic oligonucleotide
cctctaccgtaaatcgcgta

SEQ ID NO: 10731 - DNA, 33 bp, Artificial Sequence
  Description of Artificial Sequence: Synthetic oligonucleotide
ggttcgtttggttttttcggggaagaggttaat

SEQ ID NO: 10732 - DNA, 22 bp, Artificial Sequence
  Description of Artificial Sequence: Synthetic oligonucleotide
cgtaacaaacgtctaaaaatcg

SEQ ID NO: 10733 - DNA, 21 bp, Artificial Sequence
  Description of Artificial Sequence: Synthetic oligonucleotide
aacaaacgtctaaaaatcgcc

SEQ ID NO: 10734 - DNA, 21 bp, Artificial Sequence
  Description of Artificial Sequence: Synthetic oligonucleotide
tttagttcgtcgggtttttgt

SEQ ID NO: 10735 - DNA, 22 bp, Artificial Sequence
  Description of Artificial Sequence: Synthetic oligonucleotide
atcacgaatctcacgcttaaaa

SEQ ID NO: 10736 - DNA, 33 bp, Artificial Sequence
  Description of Artificial Sequence: Synthetic oligonucleotide
ttcgcggtttgtcggagttgtagcgtttttcgt

SEQ ID NO: 10737 - DNA, 21 bp, Artificial Sequence
  Description of Artificial Sequence: Synthetic oligonucleotide
ttatttacgactcctcccgaa

SEQ ID NO: 10738 - DNA, 21 bp, Artificial Sequence
  Description of Artificial Sequence: Synthetic oligonucleotide
tttatttacgactcctcccga

SEQ ID NO: 10739 - DNA, 20 bp, Artificial Sequence
  Description of Artificial Sequence: Synthetic oligonucleotide
tactcgatacccgctcaaaa

SEQ ID NO: 10740 - DNA, 21 bp, Artificial Sequence
  Description of Artificial Sequence: Synthetic oligonucleotide
gtcgggtttttgtcgttagtt

SEQ ID NO: 10741 - DNA, 21 bp, Artificial Sequence
  Description of Artificial Sequence: Synthetic oligonucleotide
aaatcacgaatctcacgctta

SEQ ID NO: 10742 - DNA, 22 bp, Artificial Sequence
  Description of Artificial Sequence: Synthetic oligonucleotide
ttttgttcgtttgagcgtttag

SEQ ID NO: 10743 - DNA, 21 bp, Artificial Sequence
  Description of Artificial Sequence: Synthetic oligonucleotide
tcgttcgggttaagtgataaa

SEQ ID NO: 10744 - DNA, 21 bp, Artificial Sequence
  Description of Artificial Sequence: Synthetic oligonucleotide
cgatttacggtagaggggagt

SEQ ID NO: 10745 - DNA, 21 bp, Artificial Sequence
  Description of Artificial Sequence: Synthetic oligonucleotide
tcgttcggttattttcggtat

SEQ ID NO: 10746 - DNA, 23 bp, Artificial Sequence
  Description of Artificial Sequence: Synthetic oligonucleotide
atcgaataaggcgaatttatttt

SEQ ID NO: 10747 - DNA, 22 bp, Artificial Sequence
  Description of Artificial Sequence: Synthetic oligonucleotide
aaactctaaacgctcaaacgaa

SEQ ID NO: 10748 - DNA, 22 bp, Artificial Sequence
  Description of Artificial Sequence: Synthetic oligonucleotide
agcgtttgagagtttgtagtcg

SEQ ID NO: 10749 - DNA, 22 bp, Artificial Sequence
  Description of Artificial Sequence: Synthetic oligonucleotide
ttgttcgtttgagcgtttagag

SEQ ID NO: 10750 - DNA, 20 bp, Artificial Sequence
  Description of Artificial Sequence: Synthetic oligonucleotide
aacgctcaaacgaacaaaaa

SEQ ID NO: 10751 - DNA, 20 bp, Artificial Sequence
  Description of Artificial Sequence: Synthetic oligonucleotide
cgtaatgaggagaggagtcg

SEQ ID NO: 10752 - DNA, 22 bp, Artificial Sequence
  Description of Artificial Sequence: Synthetic oligonucleotide
aaaatacgacgaaaaacgctac

SEQ ID NO: 10753 - DNA, 27 bp, Artificial Sequence
  Description of Artificial Sequence: Synthetic oligonucleotide
tgtcgttagttcgtcggatttcgcggt

SEQ ID NO: 10754 - DNA, 20 bp, Artificial Sequence
  Description of Artificial Sequence: Synthetic oligonucleotide
gtcgggtttttatgttttcg

SEQ ID NO: 10755 - DNA, 22 bp, Artificial Sequence
  Description of Artificial Sequence: Synthetic oligonucleotide
actaaatccaacgaccataacg

SEQ ID NO: 10756 - DNA, 28 bp, Artificial Sequence
  Description of Artificial Sequence: Synthetic oligonucleotide
agtcgaggagtcgttgtttggggtttga

SEQ ID NO: 10757 - DNA, 22 bp, Artificial Sequence
  Description of Artificial Sequence: Synthetic oligonucleotide
atacgacgaaaaacgctacaac

SEQ ID NO: 10758 - DNA, 21 bp, Artificial Sequence
  Description of Artificial Sequence: Synthetic oligonucleotide
tgtcgggtttttatgttttcg

SEQ ID NO: 10759 - DNA, 22 bp, Artificial Sequence
  Description of Artificial Sequence: Synthetic oligonucleotide
cgttcgggttaagtgataaagg

SEQ ID NO: 10760 - DNA, 21 bp, Artificial Sequence
  Description of Artificial Sequence: Synthetic oligonucleotide
ttagttcgtcgggtttttgtc

SEQ ID NO: 10761 - DNA, 22 bp, Artificial Sequence
  Description of Artificial Sequence: Synthetic oligonucleotide
gaaaatacgacgaaaaacgcta

SEQ ID NO: 10762 - DNA, 21 bp, Artificial Sequence
  Description of Artificial Sequence: Synthetic oligonucleotide
actctaaacgctcaaacgaac

SEQ ID NO: 10763 - DNA, 21 bp, Artificial Sequence
  Description of Artificial Sequence: Synthetic oligonucleotide
tctactcgatacccgctcaaa

SEQ ID NO: 10764 - DNA, 22 bp, Artificial Sequence
  Description of Artificial Sequence: Synthetic oligonucleotide
agcgtttagagtttagggtcgt

SEQ ID NO: 10765 - DNA, 21 bp, Artificial Sequence
  Description of Artificial Sequence: Synthetic oligonucleotide
ctccaacaacgataaaaaccg

SEQ ID NO: 10766 - DNA, 29 bp, Artificial Sequence
  Description of Artificial Sequence: Synthetic oligonucleotide
ttgttgtatcgagggttcgcggtttttgt

SEQ ID NO: 10767 - DNA, 20 bp, Artificial Sequence
  Description of Artificial Sequence: Synthetic oligonucleotide
tccaacaacgataaaaaccg

SEQ ID NO: 10768 - DNA, 19 bp, Artificial Sequence
  Description of Artificial Sequence: Synthetic oligonucleotide
cgggtttttatgttttcgg

SEQ ID NO: 10769 - DNA, 22 bp, Artificial Sequence
  Description of Artificial Sequence: Synthetic oligonucleotide
tagcgtttttgggttttatcgt

SEQ ID NO: 10770 - DNA, 22 bp, Artificial Sequence
  Description of Artificial Sequence: Synthetic oligonucleotide
aaaaataaattcgccttattcg

SEQ ID NO: 10771 - DNA, 29 bp, Artificial Sequence
  Description of Artificial Sequence: Synthetic oligonucleotide
tttcgtaagggtcggcgattttgattggt

SEQ ID NO: 10772 - DNA, 20 bp, Artificial Sequence
  Description of Artificial Sequence: Synthetic oligonucleotide
tagttcgtcgggtttttgtc

SEQ ID NO: 10773 - DNA, 22 bp, Artificial Sequence
  Description of Artificial Sequence: Synthetic oligonucleotide
acaaacgacgactaaatccaac

SEQ ID NO: 10774 - DNA, 32 bp, Artificial Sequence
  Description of Artificial Sequence: Synthetic oligonucleotide
aagggagttgttttcgttatcgttatggtcgt

SEQ ID NO: 10775 - DNA, 22 bp, Artificial Sequence
  Description of Artificial Sequence: Synthetic oligonucleotide
cgatttttagacgtttgttacg

SEQ ID NO: 10776 - DNA, 21 bp, Artificial Sequence
  Description of Artificial Sequence: Synthetic oligonucleotide
ctatctacgcaaccgccttac

SEQ ID NO: 10777 - DNA, 22 bp, Artificial Sequence
  Description of Artificial Sequence: Synthetic oligonucleotide
ggggcgttgggcggtgtaaggt

SEQ ID NO: 10778 - DNA, 21 bp, Artificial Sequence
  Description of Artificial Sequence: Synthetic oligonucleotide
cacgaatctcacgcttaaaaa

SEQ ID NO: 10779 - DNA, 21 bp, Artificial Sequence
  Description of Artificial Sequence: Synthetic oligonucleotide
tcacgaatctcacgcttaaaa

SEQ ID NO: 10780 - DNA, 21 bp, Artificial Sequence
  Description of Artificial Sequence: Synthetic oligonucleotide
ggcgatttttagacgtttgtt

SEQ ID NO: 10781 - DNA, 21 bp, Artificial Sequence
  Description of Artificial Sequence: Synthetic oligonucleotide
ttcgtttgagcgtttagagtt

SEQ ID NO: 10782 - DNA, 20 bp, Artificial Sequence
  Description of Artificial Sequence: Synthetic oligonucleotide
tatctacgcaaccgccttac

SEQ ID NO: 10783 - DNA, 19 bp, Artificial Sequence
  Description of Artificial Sequence: Synthetic oligonucleotide
gtaaggcggttgcgtagat

SEQ ID NO: 10784 - DNA, 22 bp, Artificial Sequence
  Description of Artificial Sequence: Synthetic oligonucleotide
tttatcacttaacccgaacgac

SEQ ID NO: 10785 - DNA, 26 bp, Artificial Sequence
  Description of Artificial Sequence: Synthetic oligonucleotide
ttcgggcgaatgcgggtttgtgtcgt

SEQ ID NO: 10786 - DNA, 21 bp, Artificial Sequence
  Description of Artificial Sequence: Synthetic oligonucleotide
gcgtttgagagtttgtagtcg

SEQ ID NO: 10787 - DNA, 37 bp, Artificial Sequence
  Description of Artificial Sequence: Synthetic oligonucleotide
ttcgtttggttttttcggggaagaggttaatattcgg

SEQ ID NO: 10788 - DNA, 22 bp, Artificial Sequence
  Description of Artificial Sequence: Synthetic oligonucleotide
acgactaaatccaacgaccata

SEQ ID NO: 10789 - DNA, 22 bp, Artificial Sequence
  Description of Artificial Sequence: Synthetic oligonucleotide
gcgtaacaaacgtctaaaaatc

SEQ ID NO: 10790 - DNA, 22 bp, Artificial Sequence
  Description of Artificial Sequence: Synthetic oligonucleotide
gtaacaaacgtctaaaaatcgc

SEQ ID NO: 10791 - DNA, 19 bp, Artificial Sequence
  Description of Artificial Sequence: Synthetic oligonucleotide
acgcgatttacggtagagg

SEQ ID NO: 10792 - DNA, 22 bp, Artificial Sequence
  Description of Artificial Sequence: Synthetic oligonucleotide
aatacgacgaaaaacgctacaa

SEQ ID NO: 10793 - DNA, 22 bp, Artificial Sequence
  Description of Artificial Sequence: Synthetic oligonucleotide
aaatacgacgaaaaacgctaca

SEQ ID NO: 10794 - DNA, 19 bp, Artificial Sequence
  Description of Artificial Sequence: Synthetic oligonucleotide
cgataaaaaccgcacacaa

SEQ ID NO: 10795 - DNA, 33 bp, Artificial Sequence
  Description of Artificial Sequence: Synthetic oligonucleotide
agggtcgtcgatcgtagtatttttcgatttgtt

SEQ ID NO: 10796 - DNA, 22 bp, Artificial Sequence
  Description of Artificial Sequence: Synthetic oligonucleotide
ttcgtttgagcgtttagagttt

SEQ ID NO: 10797 - DNA, 34 bp, Artificial Sequence
  Description of Artificial Sequence: Synthetic oligonucleotide
gggtcgtcgatcgtagtatttttcgatttgttgt

SEQ ID NO: 10798 - DNA, 22 bp, Artificial Sequence
  Description of Artificial Sequence: Synthetic oligonucleotide
ctttatcacttaacccgaacga

SEQ ID NO: 10799 - DNA, 24 bp, Artificial Sequence
  Description of Artificial Sequence: Synthetic oligonucleotide
taaactctaaacgctcaaacgaac

SEQ ID NO: 10800 - DNA, 22 bp, Artificial Sequence
  Description of Artificial Sequence: Synthetic oligonucleotide
taaactctaaacgctcaaacga

SEQ ID NO: 10801 - DNA, 22 bp, Artificial Sequence
  Description of Artificial Sequence: Synthetic oligonucleotide
ttttaggatattcggtttgacg

SEQ ID NO: 10802 - DNA, 19 bp, Artificial Sequence
  Description of Artificial Sequence: Synthetic oligonucleotide
cttaatatacgcgcccgac

SEQ ID NO: 10803 - DNA, 25 bp, Artificial Sequence
  Description of Artificial Sequence: Synthetic oligonucleotide
gtagttgcgtttaaggagcgcgcgt

SEQ ID NO: 10804 - DNA, 19 bp, Artificial Sequence
  Description of Artificial Sequence: Synthetic oligonucleotide
actcgatacccgctcaaaa

SEQ ID NO: 10805 - DNA, 20 bp, Artificial Sequence
  Description of Artificial Sequence: Synthetic oligonucleotide
tatttacgactcctcccgaa

SEQ ID NO: 10806 - DNA, 21 bp, Artificial Sequence
  Description of Artificial Sequence: Synthetic oligonucleotide
tacgacgaaaaacgctacaac

SEQ ID NO: 10807 - DNA, 22 bp, Artificial Sequence
  Description of Artificial Sequence: Synthetic oligonucleotide
actctaaacgctcaaacgaaca

SEQ ID NO: 10808 - DNA, 21 bp, Artificial Sequence
  Description of Artificial Sequence: Synthetic oligonucleotide
agcgtttagagtttagggtcg

SEQ ID NO: 10809 - DNA, 20 bp, Artificial Sequence
  Description of Artificial Sequence: Synthetic oligonucleotide
aacaacgataaaaaccgcac

SEQ ID NO: 10810 - DNA, 40 bp, Artificial Sequence
  Description of Artificial Sequence: Synthetic oligonucleotide
atcgtagtatttttcgatttgttgtatcgagggttcgcgg

SEQ ID NO: 10811 - DNA, 22 bp, Artificial Sequence
  Description of Artificial Sequence: Synthetic oligonucleotide
tacaaacgacgactaaatccaa

SEQ ID NO: 10812 - DNA, 19 bp, Artificial Sequence
  Description of Artificial Sequence: Synthetic oligonucleotide
acgataaaaaccgcacaca

SEQ ID NO: 10813 - DNA, 20 bp, Artificial Sequence
  Description of Artificial Sequence: Synthetic oligonucleotide
aacgataaaaaccgcacaca

SEQ ID NO: 10814 - DNA, 20 bp, Artificial Sequence
  Description of Artificial Sequence: Synthetic oligonucleotide
acgataaaaaccgcacacaa

SEQ ID NO: 10815 - DNA, 20 bp, Artificial Sequence
  Description of Artificial Sequence: Synthetic oligonucleotide
caacgataaaaaccgcacac

SEQ ID NO: 10816 - DNA, 20 bp, Artificial Sequence
  Description of Artificial Sequence: Synthetic oligonucleotide
acaacgataaaaaccgcaca

SEQ ID NO: 10817 - DNA, 22 bp, Artificial Sequence
  Description of Artificial Sequence: Synthetic oligonucleotide
gcgtttagagtttagggtcgtc

SEQ ID NO: 10818 - DNA, 19 bp, Artificial Sequence
  Description of Artificial Sequence: Synthetic oligonucleotide
tttttcgggaggagtcgta

SEQ ID NO: 10819 - DNA, 24 bp, Artificial Sequence
  Description of Artificial Sequence: Synthetic oligonucleotide
tatcgaataaggcgaatttatttt

SEQ ID NO: 10820 - DNA, 21 bp, Artificial Sequence
  Description of Artificial Sequence: Synthetic oligonucleotide
ctctaaacgctcaaacgaaca

SEQ ID NO: 10821 - DNA, 21 bp, Artificial Sequence
  Description of Artificial Sequence: Synthetic oligonucleotide
cgtttgagagtttgtagtcgg

SEQ ID NO: 10822 - DNA, 20 bp, Artificial Sequence
  Description of Artificial Sequence: Synthetic oligonucleotide
gaaacgcaaccaattctacg

SEQ ID NO: 10823 - DNA, 19 bp, Artificial Sequence
  Description of Artificial Sequence: Synthetic oligonucleotide
gtcgggcgcgtatattaag

SEQ ID NO: 10824 - DNA, 22 bp, Artificial Sequence
  Description of Artificial Sequence: Synthetic oligonucleotide
accgactacaaactctcaaacg

SEQ ID NO: 10825 - DNA, 33 bp, Artificial Sequence
  Description of Artificial Sequence: Synthetic oligonucleotide
tttcgcggttgggcggggcgcggtcgtttaaag

SEQ ID NO: 10826 - DNA, 22 bp, Artificial Sequence
  Description of Artificial Sequence: Synthetic oligonucleotide
gagcgtttagagtttagggtcg

SEQ ID NO: 10827 - DNA, 20 bp, Artificial Sequence
  Description of Artificial Sequence: Synthetic oligonucleotide
tcgatttgttgtatcgaggg

SEQ ID NO: 10828 - DNA, 28 bp, Artificial Sequence
  Description of Artificial Sequence: Synthetic oligonucleotide
ggtttttatcgttgttggaggcggtcgt

SEQ ID NO: 10829 - DNA, 23 bp, Artificial Sequence
  Description of Artificial Sequence: Synthetic oligonucleotide
tagcgtttgagagtttgtagtcg

SEQ ID NO: 10830 - DNA, 19 bp, Artificial Sequence
  Description of Artificial Sequence: Synthetic oligonucleotide
tttttcgtttttgggatcg

SEQ ID NO: 10831 - DNA, 22 bp, Artificial Sequence
  Description of Artificial Sequence: Synthetic oligonucleotide
acgaccaatcgactctcactac

SEQ ID NO: 10832 - DNA, 30 bp, Artificial Sequence
  Description of Artificial Sequence: Synthetic oligonucleotide
ttgtagttaggtttttgcggattggacggt

SEQ ID NO: 10833 - DNA, 22 bp, Artificial Sequence
  Description of Artificial Sequence: Synthetic oligonucleotide
ctacaaacgacgactaaatcca

SEQ ID NO: 10834 - DNA, 19 bp, Artificial Sequence
  Description of Artificial Sequence: Synthetic oligonucleotide
cggttgtcgggtttttatg

SEQ ID NO: 10835 - DNA, 22 bp, Artificial Sequence
  Description of Artificial Sequence: Synthetic oligonucleotide
atccaacgaccataacgataac

SEQ ID NO: 10836 - DNA, 31 bp, Artificial Sequence
  Description of Artificial Sequence: Synthetic oligonucleotide
ttcggcgaatggggaatagtcgaggagtcgt

SEQ ID NO: 10837 - DNA, 22 bp, Artificial Sequence
  Description of Artificial Sequence: Synthetic oligonucleotide
cgactacaaactctcaaacgct

SEQ ID NO: 10838 - DNA, 19 bp, Artificial Sequence
  Description of Artificial Sequence: Synthetic oligonucleotide
ctcgatacccgctcaaaaa

SEQ ID NO: 10839 - DNA, 20 bp, Artificial Sequence
  Description of Artificial Sequence: Synthetic oligonucleotide
cgactctactcgatacccgc

SEQ ID NO: 10840 - DNA, 21 bp, Artificial Sequence
  Description of Artificial Sequence: Synthetic oligonucleotide
tctaaacgctcaaacgaacaa

SEQ ID NO: 10841 - DNA, 23 bp, Artificial Sequence
  Description of Artificial Sequence: Synthetic oligonucleotide
actacaaacgacgactaaatcca

SEQ ID NO: 10842 - DNA, 20 bp, Artificial Sequence
  Description of Artificial Sequence: Synthetic oligonucleotide
ccgcgtaacaaacgtctaaa

SEQ ID NO: 10843 - DNA, 21 bp, Artificial Sequence
  Description of Artificial Sequence: Synthetic oligonucleotide
agcgtttttgggttttatcgt

SEQ ID NO: 10844 - DNA, 21 bp, Artificial Sequence
  Description of Artificial Sequence: Synthetic oligonucleotide
ttcgatttgttgtatcgaggg

SEQ ID NO: 10845 - DNA, 20 bp, Artificial Sequence
  Description of Artificial Sequence: Synthetic oligonucleotide
caacaacgataaaaaccgca

SEQ ID NO: 10846 - DNA, 21 bp, Artificial Sequence
  Description of Artificial Sequence: Synthetic oligonucleotide
cgactaaatccaacgaccata

SEQ ID NO: 10847 - DNA, 20 bp, Artificial Sequence
  Description of Artificial Sequence: Synthetic oligonucleotide
tcgggtttttgtcgttagtt

SEQ ID NO: 10848 - DNA, 20 bp, Artificial Sequence
  Description of Artificial Sequence: Synthetic oligonucleotide
gcgtttttgggttttatcgt

SEQ ID NO: 10849 - DNA, 22 bp, Artificial Sequence
  Description of Artificial Sequence: Synthetic oligonucleotide
gatttttagacgtttgttacgc

SEQ ID NO: 10850 - DNA, 20 bp, Artificial Sequence
  Description of Artificial Sequence: Synthetic oligonucleotide
ctatctacgcaaccgcctta

SEQ ID NO: 10851 - DNA, 21 bp, Artificial Sequence
  Description of Artificial Sequence: Synthetic oligonucleotide
acgactcctctcctcattacg

SEQ ID NO: 10852 - DNA, 33 bp, Artificial Sequence
  Description of Artificial Sequence: Synthetic oligonucleotide
atggtcgttggatttagtcgtcgtttgtagttg

SEQ ID NO: 10853 - DNA, 19 bp, Artificial Sequence
  Description of Artificial Sequence: Synthetic oligonucleotide
ttttgagcgggtatcgagt

SEQ ID NO: 10854 - DNA, 22 bp, Artificial Sequence
  Description of Artificial Sequence: Synthetic oligonucleotide
aaacaacgactcctcgactatt

SEQ ID NO: 10855 - DNA, 20 bp, Artificial Sequence
  Description of Artificial Sequence: Synthetic oligonucleotide
tgtcgcggacgggggagggg

SEQ ID NO: 10856 - DNA, 19 bp, Artificial Sequence
  Description of Artificial Sequence: Synthetic oligonucleotide
agttcgtcgggtttttgtc

SEQ ID NO: 10857 - DNA, 20 bp, Artificial Sequence
  Description of Artificial Sequence: Synthetic oligonucleotide
acaaacgtctaaaaatcgcc

SEQ ID NO: 10858 - DNA, 19 bp, Artificial Sequence
  Description of Artificial Sequence: Synthetic oligonucleotide
ttcgtgattggtttcgttc

SEQ ID NO: 10859 - DNA, 20 bp, Artificial Sequence
  Description of Artificial Sequence: Synthetic oligonucleotide
tctactcgatacccgctcaa

SEQ ID NO: 10860 - DNA, 21 bp, Artificial Sequence
  Description of Artificial Sequence: Synthetic oligonucleotide
acaacgataaaaaccgcacac

SEQ ID NO: 10861 - DNA, 19 bp, Artificial Sequence
  Description of Artificial Sequence: Synthetic oligonucleotide
acgctcaaacgaacaaaaa

SEQ ID NO: 10862 - DNA, 19 bp, Artificial Sequence
  Description of Artificial Sequence: Synthetic oligonucleotide
aaacgctcaaacgaacaaa

SEQ ID NO: 10863 - DNA, 19 bp, Artificial Sequence
  Description of Artificial Sequence: Synthetic oligonucleotide
atctacgcaaccgccttac

SEQ ID NO: 10864 - DNA, 18 bp, Artificial Sequence
  Description of Artificial Sequence: Synthetic oligonucleotide
tcgatacccgctcaaaaa

SEQ ID NO: 10865 - DNA, 21 bp, Artificial Sequence
  Description of Artificial Sequence: Synthetic oligonucleotide
acgactaaatccaacgaccat

SEQ ID NO: 10866 - DNA, 18 bp, Artificial Sequence
  Description of Artificial Sequence: Synthetic oligonucleotide
gtgtaaggcggttgcgta

SEQ ID NO: 10867 - DNA, 44 bp, Artificial Sequence
  Description of Artificial Sequence: Synthetic oligonucleotide
agcgttttttatatagagtagtttttgattcgggcgaatgcggg

SEQ ID NO: 10868 - DNA, 18 bp, Artificial Sequence
  Description of Artificial Sequence: Synthetic oligonucleotide
ctctcgacgaaacgcaac

SEQ ID NO: 10869 - DNA, 20 bp, Artificial Sequence
  Description of Artificial Sequence: Synthetic oligonucleotide
cgttcggttattttcggtat

SEQ ID NO: 10870 - DNA, 21 bp, Artificial Sequence
  Description of Artificial Sequence: Synthetic oligonucleotide
ataacgacgactcctctcctc

SEQ ID NO: 10871 - DNA, 21 bp, Artificial Sequence
  Description of Artificial Sequence: Synthetic oligonucleotide
gataacgacgactcctctcct

SEQ ID NO: 10872 - DNA, 19 bp, Artificial Sequence
  Description of Artificial Sequence: Synthetic oligonucleotide
agtgtaaggcggttgcgta

SEQ ID NO: 10873 - DNA, 20 bp, Artificial Sequence
  Description of Artificial Sequence: Synthetic oligonucleotide
acgacgaaaaacgctacaac

SEQ ID NO: 10874 - DNA, 20 bp, Artificial Sequence
  Description of Artificial Sequence: Synthetic oligonucleotide
cgggtttttgtcgttagttc

SEQ ID NO: 10875 - DNA, 21 bp, Artificial Sequence
  Description of Artificial Sequence: Synthetic oligonucleotide
aaaatcacgaatctcacgctt

SEQ ID NO: 10876 - DNA, 28 bp, Artificial Sequence
  Description of Artificial Sequence: Synthetic oligonucleotide
ttcgggtttcggtttttagtcgaagcgg

SEQ ID NO: 10877 - DNA, 21 bp, Artificial Sequence
  Description of Artificial Sequence: Synthetic oligonucleotide
gcgtttagagtttagggtcgt

SEQ ID NO: 10878 - DNA, 18 bp, Artificial Sequence
  Description of Artificial Sequence: Synthetic oligonucleotide
attggtttcgttcgggtt

SEQ ID NO: 10879 - DNA, 20 bp, Artificial Sequence
  Description of Artificial Sequence: Synthetic oligonucleotide
cgatttgttgtatcgagggt

SEQ ID NO: 10880 - DNA, 20 bp, Artificial Sequence
  Description of Artificial Sequence: Synthetic oligonucleotide
cgtaactaacgacccgaaaa

SEQ ID NO: 10881 - DNA, 21 bp, Artificial Sequence
  Description of Artificial Sequence: Synthetic oligonucleotide
ctaaatccaacgaccataacg

SEQ ID NO: 10882 - DNA, 18 bp, Artificial Sequence
  Description of Artificial Sequence: Synthetic oligonucleotide
tgtaaggcggttgcgtag

SEQ ID NO: 10883 - DNA, 20 bp, Artificial Sequence
  Description of Artificial Sequence: Synthetic oligonucleotide
tttatttacgactcctcccg

SEQ ID NO: 10884 - DNA, 20 bp, Artificial Sequence
  Description of Artificial Sequence: Synthetic oligonucleotide
tttttgagcgggtatcgagt

SEQ ID NO: 10885 - DNA, 22 bp, Artificial Sequence
  Description of Artificial Sequence: Synthetic oligonucleotide
ttcgtagtcgttgatagggttt

SEQ ID NO: 10886 - DNA, 18 bp, Artificial Sequence
  Description of Artificial Sequence: Synthetic oligonucleotide
cgcccctcgactctactc

SEQ ID NO: 10887 - DNA, 29 bp, Artificial Sequence
  Description of Artificial Sequence: Synthetic oligonucleotide
ggggtaaagcgcggatattttttgagcgg

SEQ ID NO: 10888 - DNA, 19 bp, Artificial Sequence
  Description of Artificial Sequence: Synthetic oligonucleotide
atttacgactcctcccgaa

SEQ ID NO: 10889 - DNA, 22 bp, Artificial Sequence
  Description of Artificial Sequence: Synthetic oligonucleotide
ggaatagtcgaggagtcgttgt

SEQ ID NO: 10890 - DNA, 21 bp, Artificial Sequence
  Description of Artificial Sequence: Synthetic oligonucleotide
tcaatcaaaaacgaacgataa

SEQ ID NO: 10891 - DNA, 30 bp, Artificial Sequence
  Description of Artificial Sequence: Synthetic oligonucleotide
tgtttttggcgtaatgaggagaggagtcgt

SEQ ID NO: 10892 - DNA, 21 bp, Artificial Sequence
  Description of Artificial Sequence: Synthetic oligonucleotide
tatttattttcggggttcgtt

SEQ ID NO: 10893 - DNA, 18 bp, Artificial Sequence
  Description of Artificial Sequence: Synthetic oligonucleotide
gtaagggtcggcgatttt

SEQ ID NO: 10894 - DNA, 22 bp, Artificial Sequence
  Description of Artificial Sequence: Synthetic oligonucleotide
aaaataacgctaacaaaccacg

SEQ ID NO: 10895 - DNA, 38 bp, Artificial Sequence
  Description of Artificial Sequence: Synthetic oligonucleotide
gttatcgaataaggcgaatttatttttttcgttcggtt

SEQ ID NO: 10896 - DNA, 18 bp, Artificial Sequence
  Description of Artificial Sequence: Synthetic oligonucleotide
gattggtttcgttcgggt

SEQ ID NO: 10897 - DNA, 21 bp, Artificial Sequence
  Description of Artificial Sequence: Synthetic oligonucleotide
caaacgacgactaaatccaac

SEQ ID NO: 10898 - DNA, 34 bp, Artificial Sequence
  Description of Artificial Sequence: Synthetic oligonucleotide
ggtttgaagggagttgttttcgttatcgttatgg

SEQ ID NO: 10899 - DNA, 21 bp, Artificial Sequence
  Description of Artificial Sequence: Synthetic oligonucleotide
ccgactacaaactctcaaacg

SEQ ID NO: 10900 - DNA, 19 bp, Artificial Sequence
  Description of Artificial Sequence: Synthetic oligonucleotide
gcgatttacggtagagggg

SEQ ID NO: 10901 - DNA, 20 bp, Artificial Sequence
  Description of Artificial Sequence: Synthetic oligonucleotide
cggttgtcgggtttttatgt

SEQ ID NO: 10902 - DNA, 22 bp, Artificial Sequence
  Description of Artificial Sequence: Synthetic oligonucleotide
acgataacgaaaacaactccct

SEQ ID NO: 10903 - DNA, 21 bp, Artificial Sequence
  Description of Artificial Sequence: Synthetic oligonucleotide
ggttgcgtagatagcgttttt

SEQ ID NO: 10904 - DNA, 19 bp, Artificial Sequence
  Description of Artificial Sequence: Synthetic oligonucleotide
acttaacccgaacgacgac

SEQ ID NO: 10905 - DNA, 21 bp, Artificial Sequence
  Description of Artificial Sequence: Synthetic oligonucleotide
tgagcgggtatcgagtagagt

SEQ ID NO: 10906 - DNA, 21 bp, Artificial Sequence
  Description of Artificial Sequence: Synthetic oligonucleotide
cgaaaacataaaaacccgaca

SEQ ID NO: 10907 - DNA, 20 bp, Artificial Sequence
  Description of Artificial Sequence: Synthetic oligonucleotide
tttgagcgggtatcgagtag

SEQ ID NO: 10908 - DNA, 20 bp, Artificial Sequence
  Description of Artificial Sequence: Synthetic oligonucleotide
cgaaaacataaaaacccgac

SEQ ID NO: 10909 - DNA, 19 bp, Artificial Sequence
  Description of Artificial Sequence: Synthetic oligonucleotide
tcgggtttttatgttttcg

SEQ ID NO: 10910 - DNA, 19 bp, Artificial Sequence
  Description of Artificial Sequence: Synthetic oligonucleotide
ttcgttcggttattttcgg

SEQ ID NO: 10911 - DNA, 22 bp, Artificial Sequence
  Description of Artificial Sequence: Synthetic oligonucleotide
aggtacgtttttagcggagttt

SEQ ID NO: 10912 - DNA, 18 bp, Artificial Sequence
  Description of Artificial Sequence: Synthetic oligonucleotide
aaaatcgccgacccttac

SEQ ID NO: 10913 - DNA, 33 bp, Artificial Sequence
  Description of Artificial Sequence: Synthetic oligonucleotide
gttaattataaagcggcggcggcgtttagtcgt

SEQ ID NO: 10914 - DNA, 19 bp, Artificial Sequence
  Description of Artificial Sequence: Synthetic oligonucleotide
gggaatagtcgaggagtcg

SEQ ID NO: 10915 - DNA, 22 bp, Artificial Sequence
  Description of Artificial Sequence: Synthetic oligonucleotide
tcaatcaaaaacgaacgataac

SEQ ID NO: 10916 - DNA, 20 bp, Artificial Sequence
  Description of Artificial Sequence: Synthetic oligonucleotide
cgtagaattggttgcgtttc

SEQ ID NO: 10917 - DNA, 20 bp, Artificial Sequence
  Description of Artificial Sequence: Synthetic oligonucleotide
cgaaccctcgatacaacaaa

SEQ ID NO: 10918 - DNA, 29 bp, Artificial Sequence
  Description of Artificial Sequence: Synthetic oligonucleotide
agcgtttagagtttagggtcgtcgatcgt

SEQ ID NO: 10919 - DNA, 19 bp, Artificial Sequence
  Description of Artificial Sequence: Synthetic oligonucleotide
cgttcgtgattggtttcgt

SEQ ID NO: 10920 - DNA, 19 bp, Artificial Sequence
  Description of Artificial Sequence: Synthetic oligonucleotide
ccaacaacgataaaaaccg

SEQ ID NO: 10921 - DNA, 31 bp, Artificial Sequence
  Description of Artificial Sequence: Synthetic oligonucleotide
gatttgttgtatcgagggttcgcggtttttg

SEQ ID NO: 10922 - DNA, 20 bp, Artificial Sequence
  Description of Artificial Sequence: Synthetic oligonucleotide
aaacgctacaactccgacaa

SEQ ID NO: 10923 - DNA, 28 bp, Artificial Sequence
  Description of Artificial Sequence: Synthetic oligonucleotide
tttgtcgttagttcgtcggatttcgcgg

SEQ ID NO: 10924 - DNA, 18 bp, Artificial Sequence
  Description of Artificial Sequence: Synthetic oligonucleotide
aaaattcgcctacgaccg

SEQ ID NO: 10925 - DNA, 18 bp, Artificial Sequence
  Description of Artificial Sequence: Synthetic oligonucleotide
ttaatatacgcgcccgac

SEQ ID NO: 10926 - DNA, 18 bp, Artificial Sequence
  Description of Artificial Sequence: Synthetic oligonucleotide
gtgattggtttcgttcgg

SEQ ID NO: 10927 - DNA, 21 bp, Artificial Sequence
  Description of Artificial Sequence: Synthetic oligonucleotide
cgataacgaaaacaactccct

SEQ ID NO: 10928 - DNA, 19 bp, Artificial Sequence
  Description of Artificial Sequence: Synthetic oligonucleotide
ccgaaaacataaaaacccg

SEQ ID NO: 10929 - DNA, 19 bp, Artificial Sequence
  Description of Artificial Sequence: Synthetic oligonucleotide
cccctctaccgtaaatcgc

SEQ ID NO: 10930 - DNA, 19 bp, Artificial Sequence
  Description of Artificial Sequence: Synthetic oligonucleotide
gttgcgtttcgtcgagagt

SEQ ID NO: 10931 - DNA, 22 bp, Artificial Sequence
  Description of Artificial Sequence: Synthetic oligonucleotide
ctcgatacaacaaatcgaaaaa

SEQ ID NO: 10932 - DNA, 19 bp, Artificial Sequence
  Description of Artificial Sequence: Synthetic oligonucleotide
gcggttgtcgggtttttat

SEQ ID NO: 10933 - DNA, 18 bp, Artificial Sequence
  Description of Artificial Sequence: Synthetic oligonucleotide
cgtgattggtttcgttcg

SEQ ID NO: 10934 - DNA, 22 bp, Artificial Sequence
  Description of Artificial Sequence: Synthetic oligonucleotide
cgtaaaaaccgacgactctaat

SEQ ID NO: 10935 - DNA, 22 bp, Artificial Sequence
  Description of Artificial Sequence: Synthetic oligonucleotide
gaaaatgtcgaaggtagtcgaa

SEQ ID NO: 10936 - DNA, 29 bp, Artificial Sequence
  Description of Artificial Sequence: Synthetic oligonucleotide
agggtgaattcgttttgttcggtggttgg

SEQ ID NO: 10937 - DNA, 22 bp, Artificial Sequence
  Description of Artificial Sequence: Synthetic oligonucleotide
aaaatgtcgaaggtagtcgaac

SEQ ID NO: 10938 - DNA, 22 bp, Artificial Sequence
  Description of Artificial Sequence: Synthetic oligonucleotide
aacgaatacgaacttataccgc

SEQ ID NO: 10939 - DNA, 22 bp, Artificial Sequence
  Description of Artificial Sequence: Synthetic oligonucleotide
aagtgttcgcgttttgttttag

SEQ ID NO: 10940 - DNA, 23 bp, Artificial Sequence
  Description of Artificial Sequence: Synthetic oligonucleotide
ttgttagcggttgcggggtcggt

SEQ ID NO: 10941 - DNA, 22 bp, Artificial Sequence
  Description of Artificial Sequence: Synthetic oligonucleotide
aaacctcttcgtaaaaaccgac

SEQ ID NO: 10942 - DNA, 22 bp, Artificial Sequence
  Description of Artificial Sequence: Synthetic oligonucleotide
tcgtaaaaaccgacgactctaa

SEQ ID NO: 10943 - DNA, 22 bp, Artificial Sequence
  Description of Artificial Sequence: Synthetic oligonucleotide
ttcgtaaaaaccgacgactcta

SEQ ID NO: 10944 - DNA, 22 bp, Artificial Sequence
  Description of Artificial Sequence: Synthetic oligonucleotide
acgaatacgaacttataccgcc

SEQ ID NO: 10945 - DNA, 22 bp, Artificial Sequence
  Description of Artificial Sequence: Synthetic oligonucleotide
agtgttcgcgttttgttttagt

SEQ ID NO: 10946 - DNA, 21 bp, Artificial Sequence
  Description of Artificial Sequence: Synthetic oligonucleotide
cgaatacgaacttataccgcc

SEQ ID NO: 10947 - DNA, 22 bp, Artificial Sequence
  Description of Artificial Sequence: Synthetic oligonucleotide
accttaaacgcgcaaaattaac

SEQ ID NO: 10948 - DNA, 22 bp, Artificial Sequence
  Description of Artificial Sequence: Synthetic oligonucleotide
tcggtgtagtaaatcggaaagt

SEQ ID NO: 10949 - DNA, 33 bp, Artificial Sequence
  Description of Artificial Sequence: Synthetic oligonucleotide
ggcggttttgggttttgagcgtttaagcgagta

SEQ ID NO: 10950 - DNA, 22 bp, Artificial Sequence
  Description of Artificial Sequence: Synthetic oligonucleotide
gtgttcgcgttttgttttagtt

SEQ ID NO: 10951 - DNA, 22 bp, Artificial Sequence
  Description of Artificial Sequence: Synthetic oligonucleotide
gaagtgttcgcgttttgtttta

SEQ ID NO: 10952 - DNA, 22 bp, Artificial Sequence
  Description of Artificial Sequence: Synthetic oligonucleotide
ttcggtgtagtaaatcggaaag

SEQ ID NO: 10953 - DNA, 21 bp, Artificial Sequence
  Description of Artificial Sequence: Synthetic oligonucleotide
aacctcttcgtaaaaaccgac

SEQ ID NO: 10954 - DNA, 21 bp, Artificial Sequence
  Description of Artificial Sequence: Synthetic oligonucleotide
gtttaggaagtgttcgcgttt

SEQ ID NO: 10955 - DNA, 21 bp, Artificial Sequence
  Description of Artificial Sequence: Synthetic oligonucleotide
aaccttaaacgcgcaaaatta

SEQ ID NO: 10956 - DNA, 21 bp, Artificial Sequence
  Description of Artificial Sequence: Synthetic oligonucleotide
ccttaaacgcgcaaaattaac

SEQ ID NO: 10957 - DNA, 21 bp, Artificial Sequence
  Description of Artificial Sequence: Synthetic oligonucleotide
cggaaaatgtcgaaggtagtc

SEQ ID NO: 10958 - DNA, 21 bp, Artificial Sequence
  Description of Artificial Sequence: Synthetic oligonucleotide
caaacctcttcgtaaaaaccg

SEQ ID NO: 10959 - DNA, 22 bp, Artificial Sequence
  Description of Artificial Sequence: Synthetic oligonucleotide
tcaaactaatcgactttttccg

SEQ ID NO: 10960 - DNA, 21 bp, Artificial Sequence
  Description of Artificial Sequence: Synthetic oligonucleotide
ggtcgagttttacgttcgttc

SEQ ID NO: 10961 - DNA, 27 bp, Artificial Sequence
  Description of Artificial Sequence: Synthetic oligonucleotide
ttcggttgggagtcgaagttcgaacgg

SEQ ID NO: 10962 - DNA, 21 bp, Artificial Sequence
  Description of Artificial Sequence: Synthetic oligonucleotide
aaaacgaccgaactattaccg

SEQ ID NO: 10963 - DNA, 21 bp, Artificial Sequence
  Description of Artificial Sequence: Synthetic oligonucleotide
tttaggtagcggtttttcgat

SEQ ID NO: 10964 - DNA, 34 bp, Artificial Sequence
  Description of Artificial Sequence: Synthetic oligonucleotide
gtcggggatatgggaattcggtaatcgttttcgt

SEQ ID NO: 10965 - DNA, 22 bp, Artificial Sequence
  Description of Artificial Sequence: Synthetic oligonucleotide
cggtgtagtaaatcggaaagtg

SEQ ID NO: 10966 - DNA, 21 bp, Artificial Sequence
  Description of Artificial Sequence: Synthetic oligonucleotide
agtgttcgcgttttgttttag

SEQ ID NO: 10967 - DNA, 22 bp, Artificial Sequence
  Description of Artificial Sequence: Synthetic oligonucleotide
gaacgaatacgaacttataccg

SEQ ID NO: 10968 - DNA, 22 bp, Artificial Sequence
  Description of Artificial Sequence: Synthetic oligonucleotide
cttcgtaaaaaccgacgactct

SEQ ID NO: 10969 - DNA, 22 bp, Artificial Sequence
  Description of Artificial Sequence: Synthetic oligonucleotide
gattttaggtagcggtttttcg

SEQ ID NO: 10970 - DNA, 22 bp, Artificial Sequence
  Description of Artificial Sequence: Synthetic oligonucleotide
ttttaggtagcggtttttcgat

SEQ ID NO: 10971 - DNA, 20 bp, Artificial Sequence
  Description of Artificial Sequence: Synthetic oligonucleotide
ttaaagagcggaaaatgtcg

SEQ ID NO: 10972 - DNA, 22 bp, Artificial Sequence
  Description of Artificial Sequence: Synthetic oligonucleotide
cttaatccgtctaaccctttcg

SEQ ID NO: 10973 - DNA, 22 bp, Artificial Sequence
  Description of Artificial Sequence: Synthetic oligonucleotide
tagttaattttgcgcgtttaag

SEQ ID NO: 10974 - DNA, 25 bp, Artificial Sequence
  Description of Artificial Sequence: Synthetic oligonucleotide
gtcgtggatcgcgtgtgtcgagtgt

SEQ ID NO: 10975 - DNA, 23 bp, Artificial Sequence
  Description of Artificial Sequence: Synthetic oligonucleotide
ccgaacgaatacgaacttatacc

SEQ ID NO: 10976 - DNA, 22 bp, Artificial Sequence
  Description of Artificial Sequence: Synthetic oligonucleotide
cgtagttaattttgcgcgttta

SEQ ID NO: 10977 - DNA, 20 bp, Artificial Sequence
  Description of Artificial Sequence: Synthetic oligonucleotide
ctcttcgtaaaaaccgacga

SEQ ID NO: 10978 - DNA, 21 bp, Artificial Sequence
  Description of Artificial Sequence: Synthetic oligonucleotide
ttaatccgtctaaccctttcg

SEQ ID NO: 10979 - DNA, 20 bp, Artificial Sequence
  Description of Artificial Sequence: Synthetic oligonucleotide
atgtcgaaggtagtcgaacg

SEQ ID NO: 10980 - DNA, 21 bp, Artificial Sequence
  Description of Artificial Sequence: Synthetic oligonucleotide
attttaggtagcggtttttcg

SEQ ID NO: 10981 - DNA, 21 bp, Artificial Sequence
  Description of Artificial Sequence: Synthetic oligonucleotide
cgacttaccgaaactacaacg

SEQ ID NO: 10982 - DNA, 22 bp, Artificial Sequence
  Description of Artificial Sequence: Synthetic oligonucleotide
gcggaaggattacgagttttac

SEQ ID NO: 10983 - DNA, 23 bp, Artificial Sequence
  Description of Artificial Sequence: Synthetic oligonucleotide
gggtggttcggagatgcgacggg

SEQ ID NO: 10984 - DNA, 21 bp, Artificial Sequence
  Description of Artificial Sequence: Synthetic oligonucleotide
cgccgaaaacctcctataaat

SEQ ID NO: 10985 - DNA, 23 bp, Artificial Sequence
  Description of Artificial Sequence: Synthetic oligonucleotide
gaacgaatacgaacttataccgc

SEQ ID NO: 10986 - DNA, 21 bp, Artificial Sequence
  Description of Artificial Sequence: Synthetic oligonucleotide
aatgtcgaaggtagtcgaacg

SEQ ID NO: 10987 - DNA, 23 bp, Artificial Sequence
  Description of Artificial Sequence: Synthetic oligonucleotide
gtagttaattttgcgcgtttaag

SEQ ID NO: 10988 - DNA, 20 bp, Artificial Sequence
  Description of Artificial Sequence: Synthetic oligonucleotide
cccgaacgaatacgaactta

SEQ ID NO: 10989 - DNA, 20 bp, Artificial Sequence
  Description of Artificial Sequence: Synthetic oligonucleotide
aaggtagtcgaacggaaagg

SEQ ID NO: 10990 - DNA, 35 bp, Artificial Sequence
  Description of Artificial Sequence: Synthetic oligonucleotide
aattcgttttgttcggtggttggttggaggagata

SEQ ID NO: 10991 - DNA, 22 bp, Artificial Sequence
  Description of Artificial Sequence: Synthetic oligonucleotide
gttaattttgcgcgtttaaggt

SEQ ID NO: 10992 - DNA, 21 bp, Artificial Sequence
  Description of Artificial Sequence: Synthetic oligonucleotide
aaacctcttcgtaaaaaccga

SEQ ID NO: 10993 - DNA, 22 bp, Artificial Sequence
  Description of Artificial Sequence: Synthetic oligonucleotide
ttttaataacggtggaaatcgt

SEQ ID NO: 10994 - DNA, 30 bp, Artificial Sequence
  Description of Artificial Sequence: Synthetic oligonucleotide
ttcggtgtagtaaatcggaaagtgttgcgg

SEQ ID NO: 10995 - DNA, 21 bp, Artificial Sequence
  Description of Artificial Sequence: Synthetic oligonucleotide
cgaacacttcctaaacgaaca

SEQ ID NO: 10996 - DNA, 21 bp, Artificial Sequence
  Description of Artificial Sequence: Synthetic oligonucleotide
tagcggtttttcgattgtttt

SEQ ID NO: 10997 - DNA, 22 bp, Artificial Sequence
  Description of Artificial Sequence: Synthetic oligonucleotide
cgaacgaatacgaacttatacc

SEQ ID NO: 10998 - DNA, 20 bp, Artificial Sequence
  Description of Artificial Sequence: Synthetic oligonucleotide
tttaggaagtgttcgcgttt

SEQ ID NO: 10999 - DNA, 20 bp, Artificial Sequence
  Description of Artificial Sequence: Synthetic oligonucleotide
aaaccttaaacgcgcaaaat

SEQ ID NO: 11000 - DNA, 23 bp, Artificial Sequence
  Description of Artificial Sequence: Synthetic oligonucleotide
cgaacgaatacgaacttataccg

SEQ ID NO: 11001 - DNA, 20 bp, Artificial Sequence
  Description of Artificial Sequence: Synthetic oligonucleotide
aaatacgctcccaacgaaat

SEQ ID NO: 11002 - DNA, 22 bp, Artificial Sequence
  Description of Artificial Sequence: Synthetic oligonucleotide
attagagtcgtcggtttttacg

SEQ ID NO: 11003 - DNA, 33 bp, Artificial Sequence
  Description of Artificial Sequence: Synthetic oligonucleotide
gtgaaattgtacggttgggcgtcgtcgtcgttt

SEQ ID NO: 11004 - DNA, 21 bp, Artificial Sequence
  Description of Artificial Sequence: Synthetic oligonucleotide
ttaattttgcgcgtttaaggt

SEQ ID NO: 11005 - DNA, 21 bp, Artificial Sequence
  Description of Artificial Sequence: Synthetic oligonucleotide
taattttgcgcgtttaaggtt

SEQ ID NO: 11006 - DNA, 23 bp, Artificial Sequence
  Description of Artificial Sequence: Synthetic oligonucleotide
cttcgtaaaaaccgacgactcta

SEQ ID NO: 11007 - DNA, 21 bp, Artificial Sequence
  Description of Artificial Sequence: Synthetic oligonucleotide
gtcgagttttacgttcgttcg

SEQ ID NO: 11008 - DNA, 35 bp, Artificial Sequence
  Description of Artificial Sequence: Synthetic oligonucleotide
gtcgaagttcgaacggagttaattacggacgtcgt

SEQ ID NO: 11009 - DNA, 22 bp, Artificial Sequence
  Description of Artificial Sequence: Synthetic oligonucleotide
tccgatttactacaccgaaaac

SEQ ID NO: 11010 - DNA, 19 bp, Artificial Sequence
  Description of Artificial Sequence: Synthetic oligonucleotide
gttgacgattcgagggttc

SEQ ID NO: 11011 - DNA, 37 bp, Artificial Sequence
  Description of Artificial Sequence: Synthetic oligonucleotide
ggtcgtttttaataacggtggaaatcgtatataggga

SEQ ID NO: 11012 - DNA, 21 bp, Artificial Sequence
  Description of Artificial Sequence: Synthetic oligonucleotide
taaagagcggaaaatgtcgaa

SEQ ID NO: 11013 - DNA, 21 bp, Artificial Sequence
  Description of Artificial Sequence: Synthetic oligonucleotide
aaaatacgctcccaacgaaat

SEQ ID NO: 11014 - DNA, 22 bp, Artificial Sequence
  Description of Artificial Sequence: Synthetic oligonucleotide
gtcggtttttacgaagaggttt

SEQ ID NO: 11015 - DNA, 21 bp, Artificial Sequence
  Description of Artificial Sequence: Synthetic oligonucleotide
taggaagtgttcgcgttttgt

SEQ ID NO: 11016 - DNA, 23 bp, Artificial Sequence
  Description of Artificial Sequence: Synthetic oligonucleotide
aacgtaaaactcgtaatccttcc

SEQ ID NO: 11017 - DNA, 21 bp, Artificial Sequence
  Description of Artificial Sequence: Synthetic oligonucleotide
tacgtgaaacgggggtaaata

SEQ ID NO: 11018 - DNA, 36 bp, Artificial Sequence
  Description of Artificial Sequence: Synthetic oligonucleotide
ggatttttttttcgagttaatgaagaagggaagcgg

SEQ ID NO: 11019 - DNA, 21 bp, Artificial Sequence
  Description of Artificial Sequence: Synthetic oligonucleotide
tttaggaagtgttcgcgtttt

SEQ ID NO: 11020 - DNA, 20 bp, Artificial Sequence
  Description of Artificial Sequence: Synthetic oligonucleotide
gaactattaccgcgaacgaa

SEQ ID NO: 11021 - DNA, 21 bp, Artificial Sequence
  Description of Artificial Sequence: Synthetic oligonucleotide
gtagcggtttttcgattgttt

SEQ ID NO: 11022 - DNA, 20 bp, Artificial Sequence
  Description of Artificial Sequence: Synthetic oligonucleotide
tcgagttttacgttcgttcg

SEQ ID NO: 11023 - DNA, 20 bp, Artificial Sequence
  Description of Artificial Sequence: Synthetic oligonucleotide
cgtaataggcgtttgggaat

SEQ ID NO: 11024 - DNA, 37 bp, Artificial Sequence
  Description of Artificial Sequence: Synthetic oligonucleotide
ttcgttcgtttcggttgggagtcgaagttcgaacgga

SEQ ID NO: 11025 - DNA, 23 bp, Artificial Sequence
  Description of Artificial Sequence: Synthetic oligonucleotide
tttctcttcaaacgtaaaactcg

SEQ ID NO: 11026 - DNA, 21 bp, Artificial Sequence
  Description of Artificial Sequence: Synthetic oligonucleotide
taggtagcggtttttcgattg

SEQ ID NO: 11027 - DNA, 20 bp, Artificial Sequence
  Description of Artificial Sequence: Synthetic oligonucleotide
ttcgtttaggaagtgttcgc

SEQ ID NO: 11028 - DNA, 21 bp, Artificial Sequence
  Description of Artificial Sequence: Synthetic oligonucleotide
aaatgtcgaaggtagtcgaac

SEQ ID NO: 11029 - DNA, 19 bp, Artificial Sequence
  Description of Artificial Sequence: Synthetic oligonucleotide
agagcggaaaatgtcgaag

SEQ ID NO: 11030 - DNA, 21 bp, Artificial Sequence
  Description of Artificial Sequence: Synthetic oligonucleotide
ggaaaatgtcgaaggtagtcg

SEQ ID NO: 11031 - DNA, 22 bp, Artificial Sequence
  Description of Artificial Sequence: Synthetic oligonucleotide
ttagagtcgtcggtttttacga

SEQ ID NO: 11032 - DNA, 22 bp, Artificial Sequence
  Description of Artificial Sequence: Synthetic oligonucleotide
tagagtcgtcggtttttacgaa

SEQ ID NO: 11033 - DNA, 20 bp, Artificial Sequence
  Description of Artificial Sequence: Synthetic oligonucleotide
accaatcacaaaacgacgac

SEQ ID NO: 11034 - DNA, 21 bp, Artificial Sequence
  Description of Artificial Sequence: Synthetic oligonucleotide
tcggtttttacgaagaggttt

SEQ ID NO: 11035 - DNA, 29 bp, Artificial Sequence
  Description of Artificial Sequence: Synthetic oligonucleotide
gacgttggtgaaattgtacggttgggcgt

SEQ ID NO: 11036 - DNA, 19 bp, Artificial Sequence
  Description of Artificial Sequence: Synthetic oligonucleotide
ccgcctctaactaactcgc

SEQ ID NO: 11037 - DNA, 22 bp, Artificial Sequence
  Description of Artificial Sequence: Synthetic oligonucleotide
acgttgtagtttcggtaagtcg

SEQ ID NO: 11038 - DNA, 23 bp, Artificial Sequence
  Description of Artificial Sequence: Synthetic oligonucleotide
ttcggcgggttgacggtaggggt

SEQ ID NO: 11039 - DNA, 21 bp, Artificial Sequence
  Description of Artificial Sequence: Synthetic oligonucleotide
agttaattttgcgcgtttaag

SEQ ID NO: 11040 - DNA, 19 bp, Artificial Sequence
  Description of Artificial Sequence: Synthetic oligonucleotide
aaaaccttaaacgcgcaaa

SEQ ID NO: 11041 - DNA, 19 bp, Artificial Sequence
  Description of Artificial Sequence: Synthetic oligonucleotide
aaaaaccttaaacgcgcaa

SEQ ID NO: 11042 - DNA, 22 bp, Artificial Sequence
  Description of Artificial Sequence: Synthetic oligonucleotide
acgtaaaactcgtaatccttcc

SEQ ID NO: 11043 - DNA, 19 bp, Artificial Sequence
  Description of Artificial Sequence: Synthetic oligonucleotide
aaaaatacgctcccaacga

SEQ ID NO: 11044 - DNA, 19 bp, Artificial Sequence
  Description of Artificial Sequence: Synthetic oligonucleotide
gtcgaaggtagtcgaacgg

SEQ ID NO: 11045 - DNA, 23 bp, Artificial Sequence
  Description of Artificial Sequence: Synthetic oligonucleotide
ttcaaacgtaaaactcgtaatcc

SEQ ID NO: 11046 - DNA, 22 bp, Artificial Sequence
  Description of Artificial Sequence: Synthetic oligonucleotide
ttctcttcaaacgtaaaactcg

SEQ ID NO: 11047 - DNA, 20 bp, Artificial Sequence
  Description of Artificial Sequence: Synthetic oligonucleotide
agcggtttttcgattgtttt

SEQ ID NO: 11048 - DNA, 19 bp, Artificial Sequence
  Description of Artificial Sequence: Synthetic oligonucleotide
cccgcctctaactaactcg

SEQ ID NO: 11049 - DNA, 20 bp, Artificial Sequence
  Description of Artificial Sequence: Synthetic oligonucleotide
ttaggaagtgttcgcgtttt

SEQ ID NO: 11050 - DNA, 19 bp, Artificial Sequence
  Description of Artificial Sequence: Synthetic oligonucleotide
aagagcggaaaatgtcgaa

SEQ ID NO: 11051 - DNA, 20 bp, Artificial Sequence
  Description of Artificial Sequence: Synthetic oligonucleotide
gaaggtagtcgaacggaaag

SEQ ID NO: 11052 - DNA, 21 bp, Artificial Sequence
  Description of Artificial Sequence: Synthetic oligonucleotide
aaccaatcacaaaacgacgac

SEQ ID NO: 11053 - DNA, 20 bp, Artificial Sequence
  Description of Artificial Sequence: Synthetic oligonucleotide
attttgcgcgtttaaggttt

SEQ ID NO: 11054 - DNA, 20 bp, Artificial Sequence
  Description of Artificial Sequence: Synthetic oligonucleotide
aattttgcgcgtttaaggtt

SEQ ID NO: 11055 - DNA, 21 bp, Artificial Sequence
  Description of Artificial Sequence: Synthetic oligonucleotide
catatccccgacgaataaaaa

SEQ ID NO: 11056 - DNA, 21 bp, Artificial Sequence
  Description of Artificial Sequence: Synthetic oligonucleotide
cgttaggagtagttgtaggcg

SEQ ID NO: 11057 - DNA, 22 bp, Artificial Sequence
  Description of Artificial Sequence: Synthetic oligonucleotide
agcggttatggcggtggcggag

SEQ ID NO: 11058 - DNA, 22 bp, Artificial Sequence
  Description of Artificial Sequence: Synthetic oligonucleotide
tttaataacggtggaaatcgta

SEQ ID NO: 11059 - DNA, 19 bp, Artificial Sequence
  Description of Artificial Sequence: Synthetic oligonucleotide
tgtcgaaggtagtcgaacg

SEQ ID NO: 11060 - DNA, 23 bp, Artificial Sequence
  Description of Artificial Sequence: Synthetic oligonucleotide
ctcaaactaatcgactttttccg

SEQ ID NO: 11061 - DNA, 21 bp, Artificial Sequence
  Description of Artificial Sequence: Synthetic oligonucleotide
caaactaatcgactttttccg

SEQ ID NO: 11062 - DNA, 23 bp, Artificial Sequence
  Description of Artificial Sequence: Synthetic oligonucleotide
tcaaacgtaaaactcgtaatcct

SEQ ID NO: 11063 - DNA, 20 bp, Artificial Sequence
  Description of Artificial Sequence: Synthetic oligonucleotide
cggaaaatgtcgaaggtagt

SEQ ID NO: 11064 - DNA, 22 bp, Artificial Sequence
  Description of Artificial Sequence: Synthetic oligonucleotide
ctcttcgtaaaaaccgacgact

SEQ ID NO: 11065 - DNA, 20 bp, Artificial Sequence
  Description of Artificial Sequence: Synthetic oligonucleotide
accgaactattaccgcgaac

SEQ ID NO: 11066 - DNA, 21 bp, Artificial Sequence
  Description of Artificial Sequence: Synthetic oligonucleotide
ttaggtagcggtttttcgatt

SEQ ID NO: 11067 - DNA, 20 bp, Artificial Sequence
  Description of Artificial Sequence: Synthetic oligonucleotide
aacgaccgaactattaccgc

SEQ ID NO: 11068 - DNA, 20 bp, Artificial Sequence
  Description of Artificial Sequence: Synthetic oligonucleotide
gcggaaaatgtcgaaggtag

SEQ ID NO: 11069 - DNA, 20 bp, Artificial Sequence
  Description of Artificial Sequence: Synthetic oligonucleotide
agcggaaaatgtcgaaggta

SEQ ID NO: 11070 - DNA, 20 bp, Artificial Sequence
  Description of Artificial Sequence: Synthetic oligonucleotide
cgcgacttaccgaaactaca

SEQ ID NO: 11071 - DNA, 21 bp, Artificial Sequence
  Description of Artificial Sequence: Synthetic oligonucleotide
tcttcgtaaaaaccgacgact

SEQ ID NO: 11072 - DNA, 20 bp, Artificial Sequence
  Description of Artificial Sequence: Synthetic oligonucleotide
aaacgaccgaactattaccg

SEQ ID NO: 11073 - DNA, 23 bp, Artificial Sequence
  Description of Artificial Sequence: Synthetic oligonucleotide
gaaaatgtcgaaggtagtcgaac

SEQ ID NO: 11074 - DNA, 19 bp, Artificial Sequence
  Description of Artificial Sequence: Synthetic oligonucleotide
gtttcgtcgttcgcgtaat

SEQ ID NO: 11075 - DNA, 21 bp, Artificial Sequence
  Description of Artificial Sequence: Synthetic oligonucleotide
gtgttcgcgttttgttttagt

SEQ ID NO: 11076 - DNA, 21 bp, Artificial Sequence
  Description of Artificial Sequence: Synthetic oligonucleotide
cggtttttacgaagaggtttg

SEQ ID NO: 11077 - DNA, 20 bp, Artificial Sequence
  Description of Artificial Sequence: Synthetic oligonucleotide
aaagagcggaaaatgtcgaa

SEQ ID NO: 11078 - DNA, 19 bp, Artificial Sequence
  Description of Artificial Sequence: Synthetic oligonucleotide
ccgaactattaccgcgaac

SEQ ID NO: 11079 - DNA, 19 bp, Artificial Sequence
  Description of Artificial Sequence: Synthetic oligonucleotide
aatacgctcccaacgaaat

SEQ ID NO: 11080 - DNA, 19 bp, Artificial Sequence
  Description of Artificial Sequence: Synthetic oligonucleotide
ggaagtgttcgcgttttgt

SEQ ID NO: 11081 - DNA, 22 bp, Artificial Sequence
  Description of Artificial Sequence: Synthetic oligonucleotide
tctcttcaaacgtaaaactcgt

SEQ ID NO: 11082 - DNA, 19 bp, Artificial Sequence
  Description of Artificial Sequence: Synthetic oligonucleotide
gcggtttttcgattgtttt

SEQ ID NO: 11083 - DNA, 19 bp, Artificial Sequence
  Description of Artificial Sequence: Synthetic oligonucleotide
cgaaggtagtcgaacggaa

SEQ ID NO: 11084 - DNA, 20 bp, Artificial Sequence
  Description of Artificial Sequence: Synthetic oligonucleotide
aggaagtgttcgcgttttgt

SEQ ID NO: 11085 - DNA, 19 bp, Artificial Sequence
  Description of Artificial Sequence: Synthetic oligonucleotide
acgaccgaactattaccgc

SEQ ID NO: 11086 - DNA, 20 bp, Artificial Sequence
  Description of Artificial Sequence: Synthetic oligonucleotide
acgtgaaacgggggtaaata

SEQ ID NO: 11087 - DNA, 19 bp, Artificial Sequence
  Description of Artificial Sequence: Synthetic oligonucleotide
cggggcgtagttaattttg

SEQ ID NO: 11088 - DNA, 23 bp, Artificial Sequence
  Description of Artificial Sequence: Synthetic oligonucleotide
aattagagtcgtcggtttttacg

SEQ ID NO: 11089 - DNA, 22 bp, Artificial Sequence
  Description of Artificial Sequence: Synthetic oligonucleotide
agtcgtcggtttttacgaagag

SEQ ID NO: 11090 - DNA, 22 bp, Artificial Sequence
  Description of Artificial Sequence: Synthetic oligonucleotide
agagtcgtcggtttttacgaag

SEQ ID NO: 11091 - DNA, 20 bp, Artificial Sequence
  Description of Artificial Sequence: Synthetic oligonucleotide
gtgttcgcgttttgttttag

SEQ ID NO: 11092 - DNA, 19 bp, Artificial Sequence
  Description of Artificial Sequence: Synthetic oligonucleotide
cgagttttacgttcgttcg

SEQ ID NO: 11093 - DNA, 21 bp, Artificial Sequence
  Description of Artificial Sequence: Synthetic oligonucleotide
cgtacaatttcaccaacgtct

SEQ ID NO: 11094 - DNA, 19 bp, Artificial Sequence
  Description of Artificial Sequence: Synthetic oligonucleotide
attcgttttgttcggtggt

SEQ ID NO: 11095 - DNA, 41 bp, Artificial Sequence
  Description of Artificial Sequence: Synthetic oligonucleotide
gtcgtcggtttttacgaagaggtttgaagagttgaggacgg

SEQ ID NO: 11096-11375 - skipped (280 entries)

SEQ ID NO: 11376 - DNA, 22 bp, Artificial Sequence
  Description of Artificial Sequence: Synthetic oligonucleotide
gacggttcggagtaagtttaga

SEQ ID NO: 11377 - DNA, 22 bp, Artificial Sequence
  Description of Artificial Sequence: Synthetic oligonucleotide
taatacgtcccttcgactccta

SEQ ID NO: 11378 - DNA, 33 bp, Artificial Sequence
  Description of Artificial Sequence: Synthetic oligonucleotide
ggcgatagagggaaaaagggtcgagttagtcgt

SEQ ID NO: 11379 - DNA, 22 bp, Artificial Sequence
  Description of Artificial Sequence: Synthetic oligonucleotide
aatacgtcccttcgactcctat

SEQ ID NO: 11380 - DNA, 22 bp, Artificial Sequence
  Description of Artificial Sequence: Synthetic oligonucleotide
gtaatacgtcccttcgactcct

SEQ ID NO: 11381 - DNA, 22 bp, Artificial Sequence
  Description of Artificial Sequence: Synthetic oligonucleotide
ggacggttcggagtaagtttag

SEQ ID NO: 11382 - DNA, 22 bp, Artificial Sequence
  Description of Artificial Sequence: Synthetic oligonucleotide
acggttcggagtaagtttagag

SEQ ID NO: 11383 - DNA, 22 bp, Artificial Sequence
  Description of Artificial Sequence: Synthetic oligonucleotide
cggttcggagtaagtttagagg

SEQ ID NO: 11384 - DNA, 20 bp, Artificial Sequence
  Description of Artificial Sequence: Synthetic oligonucleotide
ggacggttcggagtaagttt

SEQ ID NO: 11385 - DNA, 23 bp, Artificial Sequence
  Description of Artificial Sequence: Synthetic oligonucleotide
taatacgtcccttcgactcctat

SEQ ID NO: 11386 - DNA, 21 bp, Artificial Sequence
  Description of Artificial Sequence: Synthetic oligonucleotide
aatacgtcccttcgactccta

SEQ ID NO: 11387 - DNA, 24 bp, Artificial Sequence
  Description of Artificial Sequence: Synthetic oligonucleotide
tcgattcgtaaattgttgtatttg

SEQ ID NO: 11388 - DNA, 22 bp, Artificial Sequence
  Description of Artificial Sequence: Synthetic oligonucleotide
aacgactaactcgacccttttt

SEQ ID NO: 11389 - DNA, 38 bp, Artificial Sequence
  Description of Artificial Sequence: Synthetic oligonucleotide
tttcgagatttcggggagttagtttgttgggagagcgg

SEQ ID NO: 11390 - DNA, 22 bp, Artificial Sequence
  Description of Artificial Sequence: Synthetic oligonucleotide
aaacgactaactcgaccctttt

SEQ ID NO: 11391 - DNA, 21 bp, Artificial Sequence
  Description of Artificial Sequence: Synthetic oligonucleotide
atacgtcccttcgactcctat

SEQ ID NO: 11392 - DNA, 22 bp, Artificial Sequence
  Description of Artificial Sequence: Synthetic oligonucleotide
tctaaacttactccgaaccgtc

SEQ ID NO: 11393 - DNA, 31 bp, Artificial Sequence
  Description of Artificial Sequence: Synthetic oligonucleotide
tttcgagatttcggggagttagtttgttggg

SEQ ID NO: 11394 - DNA, 21 bp, Artificial Sequence
  Description of Artificial Sequence: Synthetic oligonucleotide
cgtcccttcgactcctataca

SEQ ID NO: 11395 - DNA, 21 bp, Artificial Sequence
  Description of Artificial Sequence: Synthetic oligonucleotide
gtaatacgtcccttcgactcc

SEQ ID NO: 11396 - DNA, 22 bp, Artificial Sequence
  Description of Artificial Sequence: Synthetic oligonucleotide
tacgtcccttcgactcctatac

SEQ ID NO: 11397 - DNA, 23 bp, Artificial Sequence
  Description of Artificial Sequence: Synthetic oligonucleotide
cgattcgtaaattgttgtatttg

SEQ ID NO: 11398 - DNA, 22 bp, Artificial Sequence
  Description of Artificial Sequence: Synthetic oligonucleotide
acgactaactcgaccctttttc

SEQ ID NO: 11399 - DNA, 21 bp, Artificial Sequence
  Description of Artificial Sequence: Synthetic oligonucleotide
cgactaactcgaccctttttc

SEQ ID NO: 11400 - DNA, 22 bp, Artificial Sequence
  Description of Artificial Sequence: Synthetic oligonucleotide
taaaacgactaactcgaccctt

SEQ ID NO: 11401 - DNA, 24 bp, Artificial Sequence
  Description of Artificial Sequence: Synthetic oligonucleotide
ttcgattcgtaaattgttgtattt

SEQ ID NO: 11402 - DNA, 22 bp, Artificial Sequence
  Description of Artificial Sequence: Synthetic oligonucleotide
cctctaaacttactccgaaccg

SEQ ID NO: 11403 - DNA, 23 bp, Artificial Sequence
  Description of Artificial Sequence: Synthetic oligonucleotide
ctctaaacttactccgaaccgtc

SEQ ID NO: 11404 - DNA, 21 bp, Artificial Sequence
  Description of Artificial Sequence: Synthetic oligonucleotide
acgtcccttcgactcctatac

SEQ ID NO: 11405 - DNA, 22 bp, Artificial Sequence
  Description of Artificial Sequence: Synthetic oligonucleotide
ataggagtcgaagggacgtatt

SEQ ID NO: 11406 - DNA, 20 bp, Artificial Sequence
  Description of Artificial Sequence: Synthetic oligonucleotide
acaactccgaacgacgactt

SEQ ID NO: 11407 - DNA, 33 bp, Artificial Sequence
  Description of Artificial Sequence: Synthetic oligonucleotide
ttttagcgatagttaacgttttttgtagcgcgg

SEQ ID NO: 11408 - DNA, 25 bp, Artificial Sequence
  Description of Artificial Sequence: Synthetic oligonucleotide
attcgattcgtaaattgttgtattt

SEQ ID NO: 11409 - DNA, 19 bp, Artificial Sequence
  Description of Artificial Sequence: Synthetic oligonucleotide
caactccgaacgacgactt

SEQ ID NO: 11410 - DNA, 20 bp, Artificial Sequence
  Description of Artificial Sequence: Synthetic oligonucleotide
tacgtcccttcgactcctat

SEQ ID NO: 11411 - DNA, 21 bp, Artificial Sequence
  Description of Artificial Sequence: Synthetic oligonucleotide
aaaacgactaactcgaccctt

SEQ ID NO: 11412 - DNA, 25 bp, Artificial Sequence
  Description of Artificial Sequence: Synthetic oligonucleotide
cgactcctatacaacactaaaacga

SEQ ID NO: 11413 - DNA, 30 bp, Artificial Sequence
  Description of Artificial Sequence: Synthetic oligonucleotide
ggcgatagagggaaaaagggtcgagttagt

SEQ ID NO: 11414 - DNA, 22 bp, Artificial Sequence
  Description of Artificial Sequence: Synthetic oligonucleotide
gtataggagtcgaagggacgta

SEQ ID NO: 11415 - DNA, 19 bp, Artificial Sequence
  Description of Artificial Sequence: Synthetic oligonucleotide
aacaactccgaacgacgac

SEQ ID NO: 11416 - DNA, 19 bp, Artificial Sequence
  Description of Artificial Sequence: Synthetic oligonucleotide
aaacaactccgaacgacga

SEQ ID NO: 11417 - DNA, 18 bp, Artificial Sequence
  Description of Artificial Sequence: Synthetic oligonucleotide
aacaactccgaacgacga

SEQ ID NO: 11418 - DNA, 21 bp, Artificial Sequence
  Description of Artificial Sequence: Synthetic oligonucleotide
acgctacgccaacacttattt

SEQ ID NO: 11419 - DNA, 21 bp, Artificial Sequence
  Description of Artificial Sequence: Synthetic oligonucleotide
gagtcgggtttcgtttttatc

SEQ ID NO: 11420 - DNA, 31 bp, Artificial Sequence
  Description of Artificial Sequence: Synthetic oligonucleotide
atcgcgcgttaacgtttgtttagtggttttg

SEQ ID NO: 11421 - DNA, 20 bp, Artificial Sequence
  Description of Artificial Sequence: Synthetic oligonucleotide
cgctacgccaacacttattt

SEQ ID NO: 11422 - DNA, 20 bp, Artificial Sequence
  Description of Artificial Sequence: Synthetic oligonucleotide
cacgctacgccaacacttat

SEQ ID NO: 11423 - DNA, 20 bp, Artificial Sequence
  Description of Artificial Sequence: Synthetic oligonucleotide
ggtttcgtttttatcgggtc

SEQ ID NO: 11424 - DNA, 21 bp, Artificial Sequence
  Description of Artificial Sequence: Synthetic oligonucleotide
ccgactcgcaaactattacat

SEQ ID NO: 11425 - DNA, 20 bp, Artificial Sequence
  Description of Artificial Sequence: Synthetic oligonucleotide
gagcggttagttcggttttt

SEQ ID NO: 11426 - DNA, 24 bp, Artificial Sequence
  Description of Artificial Sequence: Synthetic oligonucleotide
ttcgggatttcggagggggcgttg

SEQ ID NO: 11427 - DNA, 21 bp, Artificial Sequence
  Description of Artificial Sequence: Synthetic oligonucleotide
acccgactcgcaaactattac

SEQ ID NO: 11428 - DNA, 20 bp, Artificial Sequence
  Description of Artificial Sequence: Synthetic oligonucleotide
ggtttgtttcggatcgtttc

SEQ ID NO: 11429 - DNA, 22 bp, Artificial Sequence
  Description of Artificial Sequence: Synthetic oligonucleotide
aacccgactcgcaaactattac

SEQ ID NO: 11430 - DNA, 20 bp, Artificial Sequence
  Description of Artificial Sequence: Synthetic oligonucleotide
cccgactcgcaaactattac

SEQ ID NO: 11431 - DNA, 20 bp, Artificial Sequence
  Description of Artificial Sequence: Synthetic oligonucleotide
gtttcgtttttatcgggtcg

SEQ ID NO: 11432 - DNA, 20 bp, Artificial Sequence
  Description of Artificial Sequence: Synthetic oligonucleotide
gtcgggtttcgtttttatcg

SEQ ID NO: 11433 - DNA, 19 bp, Artificial Sequence
  Description of Artificial Sequence: Synthetic oligonucleotide
tagtttgcgagtcgggttt

SEQ ID NO: 11434 - DNA, 21 bp, Artificial Sequence
  Description of Artificial Sequence: Synthetic oligonucleotide
cgcgttattttagtagggttc

SEQ ID NO: 11435 - DNA, 22 bp, Artificial Sequence
  Description of Artificial Sequence: Synthetic oligonucleotide
attaaaactcgaaacgacaaac

SEQ ID NO: 11436 - DNA, 17 bp, Artificial Sequence
  Description of Artificial Sequence: Synthetic oligonucleotide
tgtttcgtcgcggtcgt

SEQ ID NO: 11437 - DNA, 17 bp, Artificial Sequence
  Description of Artificial Sequence: Synthetic oligonucleotide
taggtgaaaggtgaggt

SEQ ID NO: 11438 - DNA, 20 bp, Artificial Sequence
  Description of Artificial Sequence: Synthetic oligonucleotide
gagcgtttgtacggtttaag

SEQ ID NO: 11439 - DNA, 22 bp, Artificial Sequence
  Description of Artificial Sequence: Synthetic oligonucleotide
atattcttcgctaacgtcaatc

SEQ ID NO: 11440 - DNA, 16 bp, Artificial Sequence
  Description of Artificial Sequence: Synthetic oligonucleotide
tttcggcgtgtcgtta

SEQ ID NO: 11441 - DNA, 18 bp, Artificial Sequence
  Description of Artificial Sequence: Synthetic oligonucleotide
gttttggggaatataggg

SEQ ID NO: 11442 - DNA, 22 bp, Artificial Sequence
  Description of Artificial Sequence: Synthetic oligonucleotide
tcgcgttattttagtagggttc

SEQ ID NO: 11443 - DNA, 20 bp, Artificial Sequence
  Description of Artificial Sequence: Synthetic oligonucleotide
agcgtttgtacggtttaaga

SEQ ID NO: 11444 - DNA, 22 bp, Artificial Sequence
  Description of Artificial Sequence: Synthetic oligonucleotide
taacgtcaatcgaaactatcct

SEQ ID NO: 11445 - DNA, 22 bp, Artificial Sequence
  Description of Artificial Sequence: Synthetic oligonucleotide
ctaacgtcaatcgaaactatcc

SEQ ID NO: 11446 - DNA, 22 bp, Artificial Sequence
  Description of Artificial Sequence: Synthetic oligonucleotide
aacgtcaatcgaaactatccta

SEQ ID NO: 11447 - DNA, 22 bp, Artificial Sequence
  Description of Artificial Sequence: Synthetic oligonucleotide
cgttattttagtagggttcgta

SEQ ID NO: 11448 - DNA, 21 bp, Artificial Sequence
  Description of Artificial Sequence: Synthetic oligonucleotide
gattaaaactcgaaacgacaa

SEQ ID NO: 11449 - DNA, 22 bp, Artificial Sequence
  Description of Artificial Sequence: Synthetic oligonucleotide
gcgttattttagtagggttcgt

SEQ ID NO: 11450 - DNA, 21 bp, Artificial Sequence
  Description of Artificial Sequence: Synthetic oligonucleotide
agcgtttgtacggtttaagat

SEQ ID NO: 11451 - DNA, 22 bp, Artificial Sequence
  Description of Artificial Sequence: Synthetic oligonucleotide
catattcttcgctaacgtcaat

SEQ ID NO: 11452 - DNA, 22 bp, Artificial Sequence
  Description of Artificial Sequence: Synthetic oligonucleotide
cgtagcgttggaagtagtattg

SEQ ID NO: 11453 - DNA, 21 bp, Artificial Sequence
  Description of Artificial Sequence: Synthetic oligonucleotide
cgacccgaactaatctaatct

SEQ ID NO: 11454 - DNA, 22 bp, Artificial Sequence
  Description of Artificial Sequence: Synthetic oligonucleotide
tacgggagttttatcgtttcgt

SEQ ID NO: 11455 - DNA, 21 bp, Artificial Sequence
  Description of Artificial Sequence: Synthetic oligonucleotide
aatagttagtaatgattaggg

SEQ ID NO: 11456 - DNA, 21 bp, Artificial Sequence
  Description of Artificial Sequence: Synthetic oligonucleotide
cgtttgtacggtttaagattg

SEQ ID NO: 11457 - DNA, 22 bp, Artificial Sequence
  Description of Artificial Sequence: Synthetic oligonucleotide
atacatattcttcgctaacgtc

SEQ ID NO: 11458 - DNA, 21 bp, Artificial Sequence
  Description of Artificial Sequence: Synthetic oligonucleotide
ttaaaactcgaaacgacaaac

SEQ ID NO: 11459 - DNA, 21 bp, Artificial Sequence
  Description of Artificial Sequence: Synthetic oligonucleotide
tcgcgttattttagtagggtt

SEQ ID NO: 11460 - DNA, 22 bp, Artificial Sequence
  Description of Artificial Sequence: Synthetic oligonucleotide
gattaaaactcgaaacgacaaa

SEQ ID NO: 11461 - DNA, 21 bp, Artificial Sequence
  Description of Artificial Sequence: Synthetic oligonucleotide
tattcttcgctaacgtcaatc

SEQ ID NO: 11462 - DNA, 22 bp, Artificial Sequence
  Description of Artificial Sequence: Synthetic oligonucleotide
acatattcttcgctaacgtcaa

SEQ ID NO: 11463 - DNA, 21 bp, Artificial Sequence
  Description of Artificial Sequence: Synthetic oligonucleotide
gcgtagcgttggaagtagtat

SEQ ID NO: 11464 - DNA, 20 bp, Artificial Sequence
  Description of Artificial Sequence: Synthetic oligonucleotide
gcgtttgtacggtttaagat

SEQ ID NO: 11465 - DNA, 21 bp, Artificial Sequence
  Description of Artificial Sequence: Synthetic oligonucleotide
aacgtcaatcgaaactatcct

SEQ ID NO: 11466 - DNA, 20 bp, Artificial Sequence
  Description of Artificial Sequence: Synthetic oligonucleotide
cgattaaaactcgaaacgac

SEQ ID NO: 11467 - DNA, 21 bp, Artificial Sequence
  Description of Artificial Sequence: Synthetic oligonucleotide
gcgtttgtacggtttaagatt

SEQ ID NO: 11468 - DNA, 20 bp, Artificial Sequence
  Description of Artificial Sequence: Synthetic oligonucleotide
tcgtattttggtttcgtgtt

SEQ ID NO: 11469 - DNA, 21 bp, Artificial Sequence
  Description of Artificial Sequence: Synthetic oligonucleotide
cgcgctactactcctaataca

SEQ ID NO: 11470 - DNA, 17 bp, Artificial Sequence
  Description of Artificial Sequence: Synthetic oligonucleotide
attcggtcgtttcgggg

SEQ ID NO: 11471 - DNA, 17 bp, Artificial Sequence
  Description of Artificial Sequence: Synthetic oligonucleotide
tagcgtagattcgggtt

SEQ ID NO: 11472 - DNA, 20 bp, Artificial Sequence
  Description of Artificial Sequence: Synthetic oligonucleotide
cgtattttggtttcgtgttt

SEQ ID NO: 11473 - DNA, 22 bp, Artificial Sequence
  Description of Artificial Sequence: Synthetic oligonucleotide
cgcgctactactcctaatacaa

SEQ ID NO: 11474 - DNA, 21 bp, Artificial Sequence
  Description of Artificial Sequence: Synthetic oligonucleotide
acgtcaatcgaaactatccta

SEQ ID NO: 11475 - DNA, 22 bp, Artificial Sequence
  Description of Artificial Sequence: Synthetic oligonucleotide
accgcgctactactcctaatac

SEQ ID NO: 11476 - DNA, 21 bp, Artificial Sequence
  Description of Artificial Sequence: Synthetic oligonucleotide
atattcttcgctaacgtcaat

SEQ ID NO: 11477 - DNA, 20 bp, Artificial Sequence
  Description of Artificial Sequence: Synthetic oligonucleotide
ttcgtattttggtttcgtgt

SEQ ID NO: 11478 - DNA, 21 bp, Artificial Sequence
  Description of Artificial Sequence: Synthetic oligonucleotide
ccgcgctactactcctaatac

SEQ ID NO: 11479 - DNA, 21 bp, Artificial Sequence
  Description of Artificial Sequence: Synthetic oligonucleotide
gctaacgtcaatcgaaactat

SEQ ID NO: 11480 - DNA, 19 bp, Artificial Sequence
  Description of Artificial Sequence: Synthetic oligonucleotide
cgtaggaaagcgagaagtc

SEQ ID NO: 11481 - DNA, 19 bp, Artificial Sequence
  Description of Artificial Sequence: Synthetic oligonucleotide
gacgtaggaaagcgagaag

SEQ ID NO: 11482 - DNA, 19 bp, Artificial Sequence
  Description of Artificial Sequence: Synthetic oligonucleotide
gtaggaaagcgagaagtcg

SEQ ID NO: 11483 - DNA, 20 bp, Artificial Sequence
  Description of Artificial Sequence: Synthetic oligonucleotide
acgtaggaaagcgagaagtc

SEQ ID NO: 11484 - DNA, 21 bp, Artificial Sequence
  Description of Artificial Sequence: Synthetic oligonucleotide
cgttggaagtagtattggacg

SEQ ID NO: 11485 - DNA, 23 bp, Artificial Sequence
  Description of Artificial Sequence: Synthetic oligonucleotide
tacatattcttcgctaacgtcaa

SEQ ID NO: 11486 - DNA, 20 bp, Artificial Sequence
  Description of Artificial Sequence: Synthetic oligonucleotide
attcttcgctaacgtcaatc

SEQ ID NO: 11487 - DNA, 21 bp, Artificial Sequence
  Description of Artificial Sequence: Synthetic oligonucleotide
tacatattcttcgctaacgtc

SEQ ID NO: 11488 - DNA, 19 bp, Artificial Sequence
  Description of Artificial Sequence: Synthetic oligonucleotide
gcgtttgtacggtttaaga

SEQ ID NO: 11489 - DNA, 22 bp, Artificial Sequence
  Description of Artificial Sequence: Synthetic oligonucleotide
aaaactaaacgaacgctctaaa

SEQ ID NO: 11490 - DNA, 21 bp, Artificial Sequence
  Description of Artificial Sequence: Synthetic oligonucleotide
atacgtcgggatagattttgt

SEQ ID NO: 11491 - DNA, 19 bp, Artificial Sequence
  Description of Artificial Sequence: Synthetic oligonucleotide
ggatcgtatagacgttcgt

SEQ ID NO: 11492 - DNA, 17 bp, Artificial Sequence
  Description of Artificial Sequence: Synthetic oligonucleotide
gagggatagagattgga

SEQ ID NO: 11493 - DNA, 22 bp, Artificial Sequence
  Description of Artificial Sequence: Synthetic oligonucleotide
cgtcaacgaaaaacatacacta

SEQ ID NO: 11494 - DNA, 21 bp, Artificial Sequence
  Description of Artificial Sequence: Synthetic oligonucleotide
gttacgtttaggggtacgaag

SEQ ID NO: 11495 - DNA, 19 bp, Artificial Sequence
  Description of Artificial Sequence: Synthetic oligonucleotide
ttcggggttcgttagtcgt

SEQ ID NO: 11496 - DNA, 18 bp, Artificial Sequence
  Description of Artificial Sequence: Synthetic oligonucleotide
agattcgaagttgtggtt

SEQ ID NO: 11497 - DNA, 21 bp, Artificial Sequence
  Description of Artificial Sequence: Synthetic oligonucleotide
atataaggttggcgatacgtc

SEQ ID NO: 11498 - DNA, 22 bp, Artificial Sequence
  Description of Artificial Sequence: Synthetic oligonucleotide
aaaaactaaacgaacgctctaa

SEQ ID NO: 11499 - DNA, 22 bp, Artificial Sequence
  Description of Artificial Sequence: Synthetic oligonucleotide
gatacgtcgggatagattttgt

SEQ ID NO: 11500 - DNA, 20 bp, Artificial Sequence
  Description of Artificial Sequence: Synthetic oligonucleotide
tacgtcgggatagattttgt

SEQ ID NO: 11501 - DNA, 20 bp, Artificial Sequence
  Description of Artificial Sequence: Synthetic oligonucleotide
tataaggttggcgatacgtc

SEQ ID NO: 11502 - DNA, 21 bp, Artificial Sequence
  Description of Artificial Sequence: Synthetic oligonucleotide
actaaacgaacgctctaaacc

SEQ ID NO: 11503 - DNA, 20 bp, Artificial Sequence
  Description of Artificial Sequence: Synthetic oligonucleotide
ttacgtttaggggtacgaag

SEQ ID NO: 11504 - DNA, 22 bp, Artificial Sequence
  Description of Artificial Sequence: Synthetic oligonucleotide
acgtcaacgaaaaacatacact

SEQ ID NO: 11505 - DNA, 22 bp, Artificial Sequence
  Description of Artificial Sequence: Synthetic oligonucleotide
ctaacgtcaacgaaaaacatac

SEQ ID NO: 11506 - DNA, 22 bp, Artificial Sequence
  Description of Artificial Sequence: Synthetic oligonucleotide
aactaaacgaacgctctaaacc

SEQ ID NO: 11507 - DNA, 22 bp, Artificial Sequence
  Description of Artificial Sequence: Synthetic oligonucleotide
taacgtcaacgaaaaacataca

SEQ ID NO: 11508 - DNA, 21 bp, Artificial Sequence
  Description of Artificial Sequence: Synthetic oligonucleotide
aaactaaacgaacgctctaaa

SEQ ID NO: 11509 - DNA, 22 bp, Artificial Sequence
  Description of Artificial Sequence: Synthetic oligonucleotide
gactaacgtcaacgaaaaacat

SEQ ID NO: 11510 - DNA, 19 bp, Artificial Sequence
  Description of Artificial Sequence: Synthetic oligonucleotide
cgatacgtcgggatagatt

SEQ ID NO: 11511 - DNA, 19 bp, Artificial Sequence
  Description of Artificial Sequence: Synthetic oligonucleotide
ataaggttggcgatacgtc

SEQ ID NO: 11512 - DNA, 21 bp, Artificial Sequence
  Description of Artificial Sequence: Synthetic oligonucleotide
acgtcaacgaaaaacatacac

SEQ ID NO: 11513 - DNA, 23 bp, Artificial Sequence
  Description of Artificial Sequence: Synthetic oligonucleotide
actaacgtcaacgaaaaacatac

SEQ ID NO: 11514 - DNA, 21 bp, Artificial Sequence
  Description of Artificial Sequence: Synthetic oligonucleotide
cgtcaacgaaaaacatacact

SEQ ID NO: 11515 - DNA, 20 bp, Artificial Sequence
  Description of Artificial Sequence: Synthetic oligonucleotide
tagcgttacgtttaggggta

SEQ ID NO: 11516 - DNA, 17 bp, Artificial Sequence
  Description of Artificial Sequence: Synthetic oligonucleotide
aaggttggtgtagggag

SEQ ID NO: 11517 - DNA, 20 bp, Artificial Sequence
  Description of Artificial Sequence: Synthetic oligonucleotide
ctaaacgaacgctctaaacc

SEQ ID NO: 11518 - DNA, 19 bp, Artificial Sequence
  Description of Artificial Sequence: Synthetic oligonucleotide
acgtcgggatagattttgt

SEQ ID NO: 11519 - DNA, 21 bp, Artificial Sequence
  Description of Artificial Sequence: Synthetic oligonucleotide
ttagcgttacgtttaggggta

SEQ ID NO: 11520 - DNA, 22 bp, Artificial Sequence
  Description of Artificial Sequence: Synthetic oligonucleotide
aacgtcaacgaaaaacatacac

SEQ ID NO: 11521 - DNA, 21 bp, Artificial Sequence
  Description of Artificial Sequence: Synthetic oligonucleotide
tacgtttaggggtacgaaggt

SEQ ID NO: 11522 - DNA, 19 bp, Artificial Sequence
  Description of Artificial Sequence: Synthetic oligonucleotide
acgaacgctctaaaccact

SEQ ID NO: 11523 - DNA, 20 bp, Artificial Sequence
  Description of Artificial Sequence: Synthetic oligonucleotide
acaactccgactaacgtcaa

SEQ ID NO: 11524 - DNA, 22 bp, Artificial Sequence
  Description of Artificial Sequence: Synthetic oligonucleotide
taaacgaacgctctaaaccact

SEQ ID NO: 11525 - DNA, 19 bp, Artificial Sequence
  Description of Artificial Sequence: Synthetic oligonucleotide
agcgttacgtttaggggta

SEQ ID NO: 11526 - DNA, 22 bp, Artificial Sequence
  Description of Artificial Sequence: Synthetic oligonucleotide
actaacgtcaacgaaaaacata

SEQ ID NO: 11527 - DNA, 20 bp, Artificial Sequence
  Description of Artificial Sequence: Synthetic oligonucleotide
tacgtttaggggtacgaagg

SEQ ID NO: 11528 - DNA, 21 bp, Artificial Sequence
  Description of Artificial Sequence: Synthetic oligonucleotide
aacgtaacgctaaaaacaaca

SEQ ID NO: 11529 - DNA, 19 bp, Artificial Sequence
  Description of Artificial Sequence: Synthetic oligonucleotide
cgattcggattagtttggt

SEQ ID NO: 11530 - DNA, 22 bp, Artificial Sequence
  Description of Artificial Sequence: Synthetic oligonucleotide
tacgttttagtcggtttttcgt

SEQ ID NO: 11531 - DNA, 22 bp, Artificial Sequence
  Description of Artificial Sequence: Synthetic oligonucleotide
agttattgttggttgttttaag

SEQ ID NO: 11532 - DNA, 20 bp, Artificial Sequence
  Description of Artificial Sequence: Synthetic oligonucleotide
caaaacaactccgactaacg

SEQ ID NO: 11533 - DNA, 21 bp, Artificial Sequence
  Description of Artificial Sequence: Synthetic oligonucleotide
attagtgtatgtttttcgttg

SEQ ID NO: 11534 - DNA, 19 bp, Artificial Sequence
  Description of Artificial Sequence: Synthetic oligonucleotide
aacgaacgctctaaaccac

SEQ ID NO: 11535 - DNA, 21 bp, Artificial Sequence
  Description of Artificial Sequence: Synthetic oligonucleotide
gtattataggacggtcggttt

SEQ ID NO: 11536 - DNA, 22 bp, Artificial Sequence
  Description of Artificial Sequence: Synthetic oligonucleotide
cgaaataacaatcatcgaatta

SEQ ID NO: 11537 - DNA, 19 bp, Artificial Sequence
  Description of Artificial Sequence: Synthetic oligonucleotide
ttcgaattttttcggacgg

SEQ ID NO: 11538 - DNA, 17 bp, Artificial Sequence
  Description of Artificial Sequence: Synthetic oligonucleotide
agtcgggttttcgtagt

SEQ ID NO: 11539 - DNA, 21 bp, Artificial Sequence
  Description of Artificial Sequence: Synthetic oligonucleotide
ggtattataggacggtcggtt

SEQ ID NO: 11540 - DNA, 20 bp, Artificial Sequence
  Description of Artificial Sequence: Synthetic oligonucleotide
tattataggacggtcggttt

SEQ ID NO: 11541 - DNA, 22 bp, Artificial Sequence
  Description of Artificial Sequence: Synthetic oligonucleotide
taattcgatgattgttatttcg

SEQ ID NO: 11542 - DNA, 19 bp, Artificial Sequence
  Description of Artificial Sequence: Synthetic oligonucleotide
gataaaaacgccgtcctac

SEQ ID NO: 11543 - DNA, 19 bp, Artificial Sequence
  Description of Artificial Sequence: Synthetic oligonucleotide
ggcgtttggtaggcgacgt

SEQ ID NO: 11544 - DNA, 16 bp, Artificial Sequence
  Description of Artificial Sequence: Synthetic oligonucleotide
tgcgggcgtatatggt

SEQ ID NO: 11545 - DNA, 22 bp, Artificial Sequence
  Description of Artificial Sequence: Synthetic oligonucleotide
accgaaataacaatcatcgaat

SEQ ID NO: 11546 - DNA, 21 bp, Artificial Sequence
  Description of Artificial Sequence: Synthetic oligonucleotide
ccgaaataacaatcatcgaat

SEQ ID NO: 11547 - DNA, 20 bp, Artificial Sequence
  Description of Artificial Sequence: Synthetic oligonucleotide
ataaaaacgccgtcctacac

SEQ ID NO: 11548 - DNA, 21 bp, Artificial Sequence
  Description of Artificial Sequence: Synthetic oligonucleotide
tattataggacggtcggtttt

SEQ ID NO: 11549 - DNA, 21 bp, Artificial Sequence
  Description of Artificial Sequence: Synthetic oligonucleotide
accgaaataacaatcatcgaa

SEQ ID NO: 11550 - DNA, 22 bp, Artificial Sequence
  Description of Artificial Sequence: Synthetic oligonucleotide
agtggtattataggacggtcgg

SEQ ID NO: 11551 - DNA, 21 bp, Artificial Sequence
  Description of Artificial Sequence: Synthetic oligonucleotide
aattcgatgattgttatttcg

SEQ ID NO: 11552 - DNA, 19 bp, Artificial Sequence
  Description of Artificial Sequence: Synthetic oligonucleotide
attataggacggtcggttt

SEQ ID NO: 11553 - DNA, 18 bp, Artificial Sequence
  Description of Artificial Sequence: Synthetic oligonucleotide
taaaaacgccgtcctaca

SEQ ID NO: 11554 - DNA, 20 bp, Artificial Sequence
  Description of Artificial Sequence: Synthetic oligonucleotide
ccgaaataacaatcatcgaa

SEQ ID NO: 11555 - DNA, 21 bp, Artificial Sequence
  Description of Artificial Sequence: Synthetic oligonucleotide
gtggtattataggacggtcgg

SEQ ID NO: 11556 - DNA, 20 bp, Artificial Sequence
  Description of Artificial Sequence: Synthetic oligonucleotide
tggtattataggacggtcgg

SEQ ID NO: 11557 - DNA, 20 bp, Artificial Sequence
  Description of Artificial Sequence: Synthetic oligonucleotide
ataggacggtcggtttttat

SEQ ID NO: 11558 - DNA, 27 bp, Artificial Sequence
  Description of Artificial Sequence: Synthetic oligonucleotide
ttcggacggtattattatatagtcggg

SEQ ID NO: 11559 - DNA, 21 bp, Artificial Sequence
  Description of Artificial Sequence: Synthetic oligonucleotide
ttcgtagtgttggttttttaa

SEQ ID NO: 11560 - DNA, 20 bp, Artificial Sequence
  Description of Artificial Sequence: Synthetic oligonucleotide
tataggacggtcggttttta

SEQ ID NO: 11561 - DNA, 23 bp, Artificial Sequence
  Description of Artificial Sequence: Synthetic oligonucleotide
ttaattcgatgattgttatttcg

SEQ ID NO: 11562 - DNA, 20 bp, Artificial Sequence
  Description of Artificial Sequence: Synthetic oligonucleotide
attataggacggtcggtttt

SEQ ID NO: 11563 - DNA, 17 bp, Artificial Sequence
  Description of Artificial Sequence: Synthetic oligonucleotide
aaaaacgccgtcctaca

SEQ ID NO: 11564 - DNA, 16 bp, Artificial Sequence
  Description of Artificial Sequence: Synthetic oligonucleotide
tgcgttgcgggcgtat

SEQ ID NO: 11565 - DNA, 16 bp, Artificial Sequence
  Description of Artificial Sequence: Synthetic oligonucleotide
ggcgtttggtaggcga

SEQ ID NO: 11566 - DNA, 17 bp, Artificial Sequence
  Description of Artificial Sequence: Synthetic oligonucleotide
tcctacacccgaacgtc

SEQ ID NO: 11567 - DNA, 17 bp, Artificial Sequence
  Description of Artificial Sequence: Synthetic oligonucleotide
tgttgatggtcggagaa

SEQ ID NO: 11568 - DNA, 22 bp, Artificial Sequence
  Description of Artificial Sequence: Synthetic oligonucleotide
attcgatgattgttatttcggt

SEQ ID NO: 11569 - DNA, 23 bp, Artificial Sequence
  Description of Artificial Sequence: Synthetic oligonucleotide
tagtggtattataggacggtcgg

SEQ ID NO: 11570 - DNA, 18 bp, Artificial Sequence
  Description of Artificial Sequence: Synthetic oligonucleotide
gtcctacacccgaacgtc

SEQ ID NO: 11571 - DNA, 20 bp, Artificial Sequence
  Description of Artificial Sequence: Synthetic oligonucleotide
tcgatgattgttatttcggt

SEQ ID NO: 11572 - DNA, 19 bp, Artificial Sequence
  Description of Artificial Sequence: Synthetic oligonucleotide
taggacggtcggtttttat

SEQ ID NO: 11573 - DNA, 22 bp, Artificial Sequence
  Description of Artificial Sequence: Synthetic oligonucleotide
ctaataaccgaaaaaccctacg

SEQ ID NO: 11574 - DNA, 21 bp, Artificial Sequence
  Description of Artificial Sequence: Synthetic oligonucleotide
ggtaagagcgtcgttttgtat

SEQ ID NO: 11575 - DNA, 19 bp, Artificial Sequence
  Description of Artificial Sequence: Synthetic oligonucleotide
gacgtcgtttgttaggcgt

SEQ ID NO: 11576 - DNA, 18 bp, Artificial Sequence
  Description of Artificial Sequence: Synthetic oligonucleotide
tggttatgtgcgttcgta

SEQ ID NO: 11577 - DNA, 21 bp, Artificial Sequence
  Description of Artificial Sequence: Synthetic oligonucleotide
taataaccgaaaaaccctacg

SEQ ID NO: 11578 - DNA, 21 bp, Artificial Sequence
  Description of Artificial Sequence: Synthetic oligonucleotide
acgataatttacataacgcga

SEQ ID NO: 11579 - DNA, 21 bp, Artificial Sequence
  Description of Artificial Sequence: Synthetic oligonucleotide
aatttgagttcgtagtttcgg

SEQ ID NO: 11580 - DNA, 17 bp, Artificial Sequence
  Description of Artificial Sequence: Synthetic oligonucleotide
ggaatcgcgcgtatttt

SEQ ID NO: 11581 - DNA, 16 bp, Artificial Sequence
  Description of Artificial Sequence: Synthetic oligonucleotide
agcgagttgtgcgagg

SEQ ID NO: 11582 - DNA, 20 bp, Artificial Sequence
  Description of Artificial Sequence: Synthetic oligonucleotide
atttgagttcgtagtttcgg

SEQ ID NO: 11583 - DNA, 18 bp, Artificial Sequence
  Description of Artificial Sequence: Synthetic oligonucleotide
atcgcgcgtattttaaga

SEQ ID NO: 11584 - DNA, 21 bp, Artificial Sequence
  Description of Artificial Sequence: Synthetic oligonucleotide
agttgtgcgaggttggttcgg

SEQ ID NO: 11585 - DNA, 22 bp, Artificial Sequence
  Description of Artificial Sequence: Synthetic oligonucleotide
aacgataatttacataacgcga

SEQ ID NO: 11586 - DNA, 22 bp, Artificial Sequence
  Description of Artificial Sequence: Synthetic oligonucleotide
tctaacgaccaaactacgaaat

SEQ ID NO: 11587 - DNA, 20 bp, Artificial Sequence
  Description of Artificial Sequence: Synthetic oligonucleotide
cgtataaaagcgcgtaattg

SEQ ID NO: 11588 - DNA, 18 bp, Artificial Sequence
  Description of Artificial Sequence: Synthetic oligonucleotide
tttagttcgcgtattcgt

SEQ ID NO: 11589 - DNA, 21 bp, Artificial Sequence
  Description of Artificial Sequence: Synthetic oligonucleotide
tttatataggaggtttttgtg

SEQ ID NO: 11590 - DNA, 22 bp, Artificial Sequence
  Description of Artificial Sequence: Synthetic oligonucleotide
ctaacgaccaaactacgaaata

SEQ ID NO: 11591 - DNA, 21 bp, Artificial Sequence
  Description of Artificial Sequence: Synthetic oligonucleotide
acgaccaaactacgaaataca

SEQ ID NO: 11592 - DNA, 21 bp, Artificial Sequence
  Description of Artificial Sequence: Synthetic oligonucleotide
ctctaacgaccaaactacgaa

SEQ ID NO: 11593 - DNA, 19 bp, Artificial Sequence
  Description of Artificial Sequence: Synthetic oligonucleotide
gggttcgtgcgtataaaag

SEQ ID NO: 11594 - DNA, 19 bp, Artificial Sequence
  Description of Artificial Sequence: Synthetic oligonucleotide
gcgtataaaagcgcgtaat

SEQ ID NO: 11595 - DNA, 22 bp, Artificial Sequence
  Description of Artificial Sequence: Synthetic oligonucleotide
cgaccaaactacgaaatacaac

SEQ ID NO: 11596 - DNA, 22 bp, Artificial Sequence
  Description of Artificial Sequence: Synthetic oligonucleotide
aacgaccaaactacgaaataca

SEQ ID NO: 11597 - DNA, 22 bp, Artificial Sequence
  Description of Artificial Sequence: Synthetic oligonucleotide
atatctttcaaaatcgacgaac

SEQ ID NO: 11598 - DNA, 20 bp, Artificial Sequence
  Description of Artificial Sequence: Synthetic oligonucleotide
gtagtttcggaagcgagttg

SEQ ID NO: 11599 - DNA, 21 bp, Artificial Sequence
  Description of Artificial Sequence: Synthetic oligonucleotide
atcgttattacgaattgtttt

SEQ ID NO: 11600 - DNA, 23 bp, Artificial Sequence
  Description of Artificial Sequence: Synthetic oligonucleotide
taacgataatttacataacgcga

SEQ ID NO: 11601 - DNA, 19 bp, Artificial Sequence
  Description of Artificial Sequence: Synthetic oligonucleotide
tagtttcggaagcgagttg

SEQ ID NO: 11602 - DNA, 22 bp, Artificial Sequence
  Description of Artificial Sequence: Synthetic oligonucleotide
gttttcgaggaatataggatcg

SEQ ID NO: 11603 - DNA, 22 bp, Artificial Sequence
  Description of Artificial Sequence: Synthetic oligonucleotide
cgcgaatttaactactacttcc

SEQ ID NO: 11604 - DNA, 16 bp, Artificial Sequence
  Description of Artificial Sequence: Synthetic oligonucleotide
tttcgcggacggcggt

SEQ ID NO: 11605 - DNA, 16 bp, Artificial Sequence
  Description of Artificial Sequence: Synthetic oligonucleotide
gtcgggtagcgggtta

SEQ ID NO: 11606 - DNA, 21 bp, Artificial Sequence
  Description of Artificial Sequence: Synthetic oligonucleotide
ttttcgaggaatataggatcg

SEQ ID NO: 11607 - DNA, 20 bp, Artificial Sequence
  Description of Artificial Sequence: Synthetic oligonucleotide
tttcgaggaatataggatcg

SEQ ID NO: 11608 - DNA, 19 bp, Artificial Sequence
  Description of Artificial Sequence: Synthetic oligonucleotide
tcgaggaatataggatcgc

SEQ ID NO: 11609 - DNA, 19 bp, Artificial Sequence
  Description of Artificial Sequence: Synthetic oligonucleotide
ggtcgcggaagttatagat

SEQ ID NO: 11610 - DNA, 22 bp, Artificial Sequence
  Description of Artificial Sequence: Synthetic oligonucleotide
acgtcctaaaacgaaaaataaa

SEQ ID NO: 11611 - DNA, 20 bp, Artificial Sequence
  Description of Artificial Sequence: Synthetic oligonucleotide
ttcgttaggcgttggttcga

SEQ ID NO: 11612 - DNA, 18 bp, Artificial Sequence
  Description of Artificial Sequence: Synthetic oligonucleotide
ggggatggtttaaatgag

SEQ ID NO: 11613 - DNA, 22 bp, Artificial Sequence
  Description of Artificial Sequence: Synthetic oligonucleotide
aacgtcctaaaacgaaaaataa

SEQ ID NO: 11614 - DNA, 22 bp, Artificial Sequence
  Description of Artificial Sequence: Synthetic oligonucleotide
aaacgtcctaaaacgaaaaata

SEQ ID NO: 11615 - DNA, 23 bp, Artificial Sequence
  Description of Artificial Sequence: Synthetic oligonucleotide
acgcgaatttaactactacttcc

SEQ ID NO: 11616 - DNA, 20 bp, Artificial Sequence
  Description of Artificial Sequence: Synthetic oligonucleotide
ttcgaggaatataggatcgc

SEQ ID NO: 11617 - DNA, 22 bp, Artificial Sequence
  Description of Artificial Sequence: Synthetic oligonucleotide
cgtcctaaaacgaaaaataaaa

SEQ ID NO: 11618 - DNA, 21 bp, Artificial Sequence
  Description of Artificial Sequence: Synthetic oligonucleotide
aaaaacgtcctactaacgacc

SEQ ID NO: 11619 - DNA, 23 bp, Artificial Sequence
  Description of Artificial Sequence: Synthetic oligonucleotide
cgcgatatttttagtttgtattt

SEQ ID NO: 11620 - DNA, 16 bp, Artificial Sequence
  Description of Artificial Sequence: Synthetic oligonucleotide
agtttaggcggcgcgt

SEQ ID NO: 11621 - DNA, 17 bp, Artificial Sequence
  Description of Artificial Sequence: Synthetic oligonucleotide
ttcgtacgttggagcgt

SEQ ID NO: 11622 - DNA, 21 bp, Artificial Sequence
  Description of Artificial Sequence: Synthetic oligonucleotide
actacactaccgcgaaaactc

SEQ ID NO: 11623 - DNA, 22 bp, Artificial Sequence
  Description of Artificial Sequence: Synthetic oligonucleotide
gtttagtagttcgttgttcggt

SEQ ID NO: 11624 - DNA, 24 bp, Artificial Sequence
  Description of Artificial Sequence: Synthetic oligonucleotide
ttcgcgattttgtgtttttcggaa

SEQ ID NO: 11625 - DNA, 20 bp, Artificial Sequence
  Description of Artificial Sequence: Synthetic oligonucleotide
gaattagttatggtgttgtg

SEQ ID NO: 11626 - DNA, 20 bp, Artificial Sequence
  Description of Artificial Sequence: Synthetic oligonucleotide
ctacactaccgcgaaaactc

SEQ ID NO: 11627 - DNA, 22 bp, Artificial Sequence
  Description of Artificial Sequence: Synthetic oligonucleotide
tttagtagttcgttgttcggtt

SEQ ID NO: 11628 - DNA, 20 bp, Artificial Sequence
  Description of Artificial Sequence: Synthetic oligonucleotide
ataacaataacacccgacga

SEQ ID NO: 11629 - DNA, 22 bp, Artificial Sequence
  Description of Artificial Sequence: Synthetic oligonucleotide
tatggtagtagtttttcgcgtt

SEQ ID NO: 11630 - DNA, 21 bp, Artificial Sequence
  Description of Artificial Sequence: Synthetic oligonucleotide
ttcggcgtagttttttagcgg

SEQ ID NO: 11631 - DNA, 21 bp, Artificial Sequence
  Description of Artificial Sequence: Synthetic oligonucleotide
gtttttggatgttgttgaaat

SEQ ID NO: 11632 - DNA, 20 bp, Artificial Sequence
  Description of Artificial Sequence: Synthetic oligonucleotide
cgataacaataacacccgac

SEQ ID NO: 11633 - DNA, 19 bp, Artificial Sequence
  Description of Artificial Sequence: Synthetic oligonucleotide
taacaataacacccgacga

SEQ ID NO: 11634 - DNA, 21 bp, Artificial Sequence
  Description of Artificial Sequence: Synthetic oligonucleotide
ttagtagttcgttgttcggtt

SEQ ID NO: 11635 - DNA, 22 bp, Artificial Sequence
  Description of Artificial Sequence: Synthetic oligonucleotide
taaacaaaacgtctcgaattta

SEQ ID NO: 11636 - DNA, 22 bp, Artificial Sequence
  Description of Artificial Sequence: Synthetic oligonucleotide
cgttatagaggaggagtttacg

SEQ ID NO: 11637 - DNA, 17 bp, Artificial Sequence
  Description of Artificial Sequence: Synthetic oligonucleotide
ttcgagtttcgaatcgg

SEQ ID NO: 11638 - DNA, 17 bp, Artificial Sequence
  Description of Artificial Sequence: Synthetic oligonucleotide
gggagggagagttattt

SEQ ID NO: 11639 - DNA, 22 bp, Artificial Sequence
  Description of Artificial Sequence: Synthetic oligonucleotide
gcggagtaggttatattatcgt

SEQ ID NO: 11640 - DNA, 23 bp, Artificial Sequence
  Description of Artificial Sequence: Synthetic oligonucleotide
ataaacaaaacgtctcgaattta

SEQ ID NO: 11641 - DNA, 21 bp, Artificial Sequence
  Description of Artificial Sequence: Synthetic oligonucleotide
aaacaaaacgtctcgaattta

SEQ ID NO: 11642 - DNA, 21 bp, Artificial Sequence
  Description of Artificial Sequence: Synthetic oligonucleotide
cataaacaaaacgtctcgaat

SEQ ID NO: 11643 - DNA, 22 bp, Artificial Sequence
  Description of Artificial Sequence: Synthetic oligonucleotide
tcataaacaaaacgtctcgaat

SEQ ID NO: 11644 - DNA, 22 bp, Artificial Sequence
  Description of Artificial Sequence: Synthetic oligonucleotide
ggcggagtaggttatattatcg

SEQ ID NO: 11645 - DNA, 23 bp, Artificial Sequence
  Description of Artificial Sequence: Synthetic oligonucleotide
acgttatagaggaggagtttacg

SEQ ID NO: 11646 - DNA, 23 bp, Artificial Sequence
  Description of Artificial Sequence: Synthetic oligonucleotide
cggagtaggttatattatcgttt

SEQ ID NO: 11647 - DNA, 22 bp, Artificial Sequence
  Description of Artificial Sequence: Synthetic oligonucleotide
ctcataaacaaaacgtctcgaa

SEQ ID NO: 11648 - DNA, 22 bp, Artificial Sequence
  Description of Artificial Sequence: Synthetic oligonucleotide
acgataatataacctactccgc

SEQ ID NO: 11649 - DNA, 19 bp, Artificial Sequence
  Description of Artificial Sequence: Synthetic oligonucleotide
tcgggaaagtaaagcgtat

SEQ ID NO: 11650 - DNA, 16 bp, Artificial Sequence
  Description of Artificial Sequence: Synthetic oligonucleotide
atagcgaaggcgtcga

SEQ ID NO: 11651 - DNA, 19 bp, Artificial Sequence
  Description of Artificial Sequence: Synthetic oligonucleotide
gttatagaggaggagttta

SEQ ID NO: 11652 - DNA, 20 bp, Artificial Sequence
  Description of Artificial Sequence: Synthetic oligonucleotide
cgggaaagtaaagcgtattt

SEQ ID NO: 11653 - DNA, 20 bp, Artificial Sequence
  Description of Artificial Sequence: Synthetic oligonucleotide
ttcgggaaagtaaagcgtat

SEQ ID NO: 11654 - DNA, 20 bp, Artificial Sequence
  Description of Artificial Sequence: Synthetic oligonucleotide
aacaaaacgtctcgaattta

SEQ ID NO: 11655 - DNA, 24 bp, Artificial Sequence
  Description of Artificial Sequence: Synthetic oligonucleotide
cataaacaaaacgtctcgaattta

SEQ ID NO: 11656 - DNA, 23 bp, Artificial Sequence
  Description of Artificial Sequence: Synthetic oligonucleotide
aacgataatataacctactccgc

SEQ ID NO: 11657 - DNA, 22 bp, Artificial Sequence
  Description of Artificial Sequence: Synthetic oligonucleotide
cgataatataacctactccgcc

SEQ ID NO: 11658 - DNA, 23 bp, Artificial Sequence
  Description of Artificial Sequence: Synthetic oligonucleotide
aaacgataatataacctactccg

SEQ ID NO: 11659 - DNA, 19 bp, Artificial Sequence
  Description of Artificial Sequence: Synthetic oligonucleotide
gtattcggggtaaaagtcg

SEQ ID NO: 11660 - DNA, 22 bp, Artificial Sequence
  Description of Artificial Sequence: Synthetic oligonucleotide
taaaacgtaaataacgcaaaca

SEQ ID NO: 11661 - DNA, 19 bp, Artificial Sequence
  Description of Artificial Sequence: Synthetic oligonucleotide
atcgggattcgtagcgcga

SEQ ID NO: 11662 - DNA, 16 bp, Artificial Sequence
  Description of Artificial Sequence: Synthetic oligonucleotide
ttcgtttaagcggggt

SEQ ID NO: 11663 - DNA, 19 bp, Artificial Sequence
  Description of Artificial Sequence: Synthetic oligonucleotide
cgtattcggggtaaaagtc

SEQ ID NO: 11664 - DNA, 19 bp, Artificial Sequence
  Description of Artificial Sequence: Synthetic oligonucleotide
tcgtattcggggtaaaagt

SEQ ID NO: 11665 - DNA, 20 bp, Artificial Sequence
  Description of Artificial Sequence: Synthetic oligonucleotide
ttcgtattcggggtaaaagt

SEQ ID NO: 11666 - DNA, 22 bp, Artificial Sequence
  Description of Artificial Sequence: Synthetic oligonucleotide
tcgcgttgtagtttagttaggt

SEQ ID NO: 11667 - DNA, 19 bp, Artificial Sequence
  Description of Artificial Sequence: Synthetic oligonucleotide
ttaccccgaatacgaaaac

SEQ ID NO: 11668 - DNA, 16 bp, Artificial Sequence
  Description of Artificial Sequence: Synthetic oligonucleotide
ttcggacggggcgttt

SEQ ID NO: 11669 - DNA, 19 bp, Artificial Sequence
  Description of Artificial Sequence: Synthetic oligonucleotide
ggtagaggggattttttaa

SEQ ID NO: 11670 - DNA, 22 bp, Artificial Sequence
  Description of Artificial Sequence: Synthetic oligonucleotide
cgttgtagtttagttaggtcgc

SEQ ID NO: 11671 - DNA, 22 bp, Artificial Sequence
  Description of Artificial Sequence: Synthetic oligonucleotide
cgcgttgtagtttagttaggtc

SEQ ID NO: 11672 - DNA, 22 bp, Artificial Sequence
  Description of Artificial Sequence: Synthetic oligonucleotide
ttgtagtttagttaggtcgcgt

SEQ ID NO: 11673 - DNA, 21 bp, Artificial Sequence
  Description of Artificial Sequence: Synthetic oligonucleotide
tttcgtattcggggtaaaagt

SEQ ID NO: 11674 - DNA, 19 bp, Artificial Sequence
  Description of Artificial Sequence: Synthetic oligonucleotide
acttttaccccgaatacga

SEQ ID NO: 11675 - DNA, 19 bp, Artificial Sequence
  Description of Artificial Sequence: Synthetic oligonucleotide
cgacttttaccccgaatac

SEQ ID NO: 11676 - DNA, 21 bp, Artificial Sequence
  Description of Artificial Sequence: Synthetic oligonucleotide
cctaaaacgtaaataacgcaa

SEQ ID NO: 11677 - DNA, 22 bp, Artificial Sequence
  Description of Artificial Sequence: Synthetic oligonucleotide
ggtttttcgtattttacgtgtt

SEQ ID NO: 11678 - DNA, 18 bp, Artificial Sequence
  Description of Artificial Sequence: Synthetic oligonucleotide
cgacgcgacctaactaaa

SEQ ID NO: 11679 - DNA, 16 bp, Artificial Sequence
  Description of Artificial Sequence: Synthetic oligonucleotide
agggtcgttttcgcgt

SEQ ID NO: 11680 - DNA, 18 bp, Artificial Sequence
  Description of Artificial Sequence: Synthetic oligonucleotide
atagggggttttcgtgag

SEQ ID NO: 11681 - DNA, 21 bp, Artificial Sequence
  Description of Artificial Sequence: Synthetic oligonucleotide
cgagttcggagtttttgtagt

SEQ ID NO: 11682 - DNA, 20 bp, Artificial Sequence
  Description of Artificial Sequence: Synthetic oligonucleotide
cgatattcttcctcgctaaa

SEQ ID NO: 11683 - DNA, 20 bp, Artificial Sequence
  Description of Artificial Sequence: Synthetic oligonucleotide
ttcggaagaggtcgtttcgt

SEQ ID NO: 11684 - DNA, 23 bp, Artificial Sequence
  Description of Artificial Sequence: Synthetic oligonucleotide
ggcgtaattttttttagaaacgg

SEQ ID NO: 11685 - DNA, 22 bp, Artificial Sequence
  Description of Artificial Sequence: Synthetic oligonucleotide
ctaaaacgtaaataacgcaaac

SEQ ID NO: 11686 - DNA, 19 bp, Artificial Sequence
  Description of Artificial Sequence: Synthetic oligonucleotide
cttttaccccgaatacgaa

SEQ ID NO: 11687 - DNA, 22 bp, Artificial Sequence
  Description of Artificial Sequence: Synthetic oligonucleotide
gcgttgtagtttagttaggtcg

SEQ ID NO: 11688 - DNA, 22 bp, Artificial Sequence
  Description of Artificial Sequence: Synthetic oligonucleotide
aaaacgtaaataacgcaaacac

SEQ ID NO: 11689 - DNA, 21 bp, Artificial Sequence
  Description of Artificial Sequence: Synthetic oligonucleotide
aaacgtaaataacgcaaacac

SEQ ID NO: 11690 - DNA, 22 bp, Artificial Sequence
  Description of Artificial Sequence: Synthetic oligonucleotide
tttcgcgttgtagtttagttag

SEQ ID NO: 11691 - DNA, 19 bp, Artificial Sequence
  Description of Artificial Sequence: Synthetic oligonucleotide
gaatacgaaaaccaccgaa

SEQ ID NO: 11692 - DNA, 19 bp, Artificial Sequence
  Description of Artificial Sequence: Synthetic oligonucleotide
atacgaaaaccaccgaaaa

SEQ ID NO: 11693 - DNA, 19 bp, Artificial Sequence
  Description of Artificial Sequence: Synthetic oligonucleotide
aatacgaaaaccaccgaaa

SEQ ID NO: 11694 - DNA, 22 bp, Artificial Sequence
  Description of Artificial Sequence: Synthetic oligonucleotide
ttcgcgttgtagtttagttagg

SEQ ID NO: 11695 - DNA, 20 bp, Artificial Sequence
  Description of Artificial Sequence: Synthetic oligonucleotide
tttaccccgaatacgaaaac

SEQ ID NO: 11696 - DNA, 21 bp, Artificial Sequence
  Description of Artificial Sequence: Synthetic oligonucleotide
tgtagtttagttaggtcgcgt

SEQ ID NO: 11697 - DNA, 21 bp, Artificial Sequence
  Description of Artificial Sequence: Synthetic oligonucleotide
tcgcgttgtagtttagttagg

SEQ ID NO: 11698 - DNA, 20 bp, Artificial Sequence
  Description of Artificial Sequence: Synthetic oligonucleotide
gacttttaccccgaatacga

SEQ ID NO: 11699 - DNA, 19 bp, Artificial Sequence
  Description of Artificial Sequence: Synthetic oligonucleotide
ttttaccccgaatacgaaa

SEQ ID NO: 11700 - DNA, 19 bp, Artificial Sequence
  Description of Artificial Sequence: Synthetic oligonucleotide
tttaccccgaatacgaaaa

SEQ ID NO: 11701 - DNA, 22 bp, Artificial Sequence
  Description of Artificial Sequence: Synthetic oligonucleotide
ttatcggattttagatcgtttt

SEQ ID NO: 11702 - DNA, 19 bp, Artificial Sequence
  Description of Artificial Sequence: Synthetic oligonucleotide
cgaaacctaacccttcgat

SEQ ID NO: 11703 - DNA, 16 bp, Artificial Sequence
  Description of Artificial Sequence: Synthetic oligonucleotide
gtatcgtcgttcggga

SEQ ID NO: 11704 - DNA, 21 bp, Artificial Sequence
  Description of Artificial Sequence: Synthetic oligonucleotide
agtttaggatttagatttggt

SEQ ID NO: 11705 - DNA, 20 bp, Artificial Sequence
  Description of Artificial Sequence: Synthetic oligonucleotide
ggtcgttttcgtttatatcg

SEQ ID NO: 11706 - DNA, 20 bp, Artificial Sequence
  Description of Artificial Sequence: Synthetic oligonucleotide
ctcgctacctaactcacgaa

SEQ ID NO: 11707 - DNA, 24 bp, Artificial Sequence
  Description of Artificial Sequence: Synthetic oligonucleotide
aacggggtttttcgtattttacgt

SEQ ID NO: 11708 - DNA, 24 bp, Artificial Sequence
  Description of Artificial Sequence: Synthetic oligonucleotide
tgcgcgtttggggtttttttatag

SEQ ID NO: 11709 - DNA, 22 bp, Artificial Sequence
  Description of Artificial Sequence: Synthetic oligonucleotide
gttatcggtatttcggagttta

SEQ ID NO: 11710 - DNA, 18 bp, Artificial Sequence
  Description of Artificial Sequence: Synthetic oligonucleotide
ccgaccttctaacgaacc

SEQ ID NO: 11711 - DNA, 17 bp, Artificial Sequence
  Description of Artificial Sequence: Synthetic oligonucleotide
atcggcgggaatttcgg

SEQ ID NO: 11712 - DNA, 19 bp, Artificial Sequence
  Description of Artificial Sequence: Synthetic oligonucleotide
ggttttagaatgagaggtt

SEQ ID NO: 11713 - DNA, 18 bp, Artificial Sequence
  Description of Artificial Sequence: Synthetic oligonucleotide
gaggatcgggattcgtag

SEQ ID NO: 11714 - DNA, 19 bp, Artificial Sequence
  Description of Artificial Sequence: Synthetic oligonucleotide
ttcgtttaagcggggtcgt

SEQ ID NO: 11715 - DNA, 22 bp, Artificial Sequence
  Description of Artificial Sequence: Synthetic oligonucleotide
gtcgggtttttgcgcggtggta

SEQ ID NO: 11716 - DNA, 19 bp, Artificial Sequence
  Description of Artificial Sequence: Synthetic oligonucleotide
aaaaccgaaacgacgtaaa

SEQ ID NO: 11717 - DNA, 17 bp, Artificial Sequence
  Description of Artificial Sequence: Synthetic oligonucleotide
tttgtttcggcgcgcgg

SEQ ID NO: 11718 - DNA, 17 bp, Artificial Sequence
  Description of Artificial Sequence: Synthetic oligonucleotide
gtcggtagaggggattt

SEQ ID NO: 11719 - DNA, 20 bp, Artificial Sequence
  Description of Artificial Sequence: Synthetic oligonucleotide
cgagttaaagcgaggttttg

SEQ ID NO: 11720 - DNA, 22 bp, Artificial Sequence
  Description of Artificial Sequence: Synthetic oligonucleotide
taaactccgaaataccgataac

SEQ ID NO: 11721 - DNA, 25 bp, Artificial Sequence
  Description of Artificial Sequence: Synthetic oligonucleotide
ttcgggtatcgttattagagaacgg

SEQ ID NO: 11722 - DNA, 18 bp, Artificial Sequence
  Description of Artificial Sequence: Synthetic oligonucleotide
gttttgagcggaattcgt

SEQ ID NO: 11723 - DNA, 18 bp, Artificial Sequence
  Description of Artificial Sequence: Synthetic oligonucleotide
gaacggggtttttcgtat

SEQ ID NO: 11724 - DNA, 22 bp, Artificial Sequence
  Description of Artificial Sequence: Synthetic oligonucleotide
cgcgacctaactaaactacaac

SEQ ID NO: 11725 - DNA, 22 bp, Artificial Sequence
  Description of Artificial Sequence: Synthetic oligonucleotide
cgacctaactaaactacaacgc

SEQ ID NO: 11726 - DNA, 16 bp, Artificial Sequence
  Description of Artificial Sequence: Synthetic oligonucleotide
tacgtgttttgcgcgt

SEQ ID NO: 11727 - DNA, 22 bp, Artificial Sequence
  Description of Artificial Sequence: Synthetic oligonucleotide
gcgacctaactaaactacaacg

SEQ ID NO: 11728 - DNA, 22 bp, Artificial Sequence
  Description of Artificial Sequence: Synthetic oligonucleotide
acctaactaaactacaacgcga

SEQ ID NO: 11729 - DNA, 22 bp, Artificial Sequence
  Description of Artificial Sequence: Synthetic oligonucleotide
ttatcggtatttcggagtttag

SEQ ID NO: 11730 - DNA, 18 bp, Artificial Sequence
  Description of Artificial Sequence: Synthetic oligonucleotide
gccgaccttctaacgaac

SEQ ID NO: 11731 - DNA, 18 bp, Artificial Sequence
  Description of Artificial Sequence: Synthetic oligonucleotide
gaccttctaacgaaccgc

SEQ ID NO: 11732 - DNA, 21 bp, Artificial Sequence
  Description of Artificial Sequence: Synthetic oligonucleotide
cctaactaaactacaacgcga

SEQ ID NO: 11733 - DNA, 22 bp, Artificial Sequence
  Description of Artificial Sequence: Synthetic oligonucleotide
ttttcgtattttacgtgttttg

SEQ ID NO: 11734 - DNA, 19 bp, Artificial Sequence
  Description of Artificial Sequence: Synthetic oligonucleotide
taccgacgcgacctaacta

SEQ ID NO: 11735 - DNA, 18 bp, Artificial Sequence
  Description of Artificial Sequence: Synthetic oligonucleotide
tacgaaaaccaccgaaaa

SEQ ID NO: 11736 - DNA, 22 bp, Artificial Sequence
  Description of Artificial Sequence: Synthetic oligonucleotide
ctaaactccgaaataccgataa

SEQ ID NO: 11737 - DNA, 20 bp, Artificial Sequence
  Description of Artificial Sequence: Synthetic oligonucleotide
ctaccgacgcgacctaacta

SEQ ID NO: 11738 - DNA, 20 bp, Artificial Sequence
  Description of Artificial Sequence: Synthetic oligonucleotide
ttttaccccgaatacgaaaa

SEQ ID NO: 11739 - DNA, 18 bp, Artificial Sequence
  Description of Artificial Sequence: Synthetic oligonucleotide
cgtaggtaggcggtttgt

SEQ ID NO: 11740 - DNA, 22 bp, Artificial Sequence
  Description of Artificial Sequence: Synthetic oligonucleotide
caaaacacgtaaaatacgaaaa

SEQ ID NO: 11741 - DNA, 16 bp, Artificial Sequence
  Description of Artificial Sequence: Synthetic oligonucleotide
ggcgcgtggggaacgg

SEQ ID NO: 11742 - DNA, 17 bp, Artificial Sequence
  Description of Artificial Sequence: Synthetic oligonucleotide
agcgcggttttcggcgg

SEQ ID NO: 11743 - DNA, 17 bp, Artificial Sequence
  Description of Artificial Sequence: Synthetic oligonucleotide
ctttcgccgaccttcta

SEQ ID NO: 11744 - DNA, 22 bp, Artificial Sequence
  Description of Artificial Sequence: Synthetic oligonucleotide
gttatcggattttagatcgttt

SEQ ID NO: 11745 - DNA, 22 bp, Artificial Sequence
  Description of Artificial Sequence: Synthetic oligonucleotide
gtgggtcgttttcgtttatatc

SEQ ID NO: 11746 - DNA, 22 bp, Artificial Sequence
  Description of Artificial Sequence: Synthetic oligonucleotide
gacgcgacctaactaaactaca

SEQ ID NO: 11747 - DNA, 17 bp, Artificial Sequence
  Description of Artificial Sequence: Synthetic oligonucleotide
cttctaacgaaccgcgt

SEQ ID NO: 11748 - DNA, 18 bp, Artificial Sequence
  Description of Artificial Sequence: Synthetic oligonucleotide
acggggtttttcgtattt

SEQ ID NO: 11749 - DNA, 18 bp, Artificial Sequence
  Description of Artificial Sequence: Synthetic oligonucleotide
aacggggtttttcgtatt

SEQ ID NO: 11750 - DNA, 20 bp, Artificial Sequence
  Description of Artificial Sequence: Synthetic oligonucleotide
aaaaaccgaaacgacgtaaa

SEQ ID NO: 11751 - DNA, 22 bp, Artificial Sequence
  Description of Artificial Sequence: Synthetic oligonucleotide
acgttagttgaggtagtatcgg

SEQ ID NO: 11752 - DNA, 18 bp, Artificial Sequence
  Description of Artificial Sequence: Synthetic oligonucleotide
gataacgacgatccgctt

SEQ ID NO: 11753 - DNA, 16 bp, Artificial Sequence
  Description of Artificial Sequence: Synthetic oligonucleotide
gacgcggttcgttaga

SEQ ID NO: 11754 - DNA, 19 bp, Artificial Sequence
  Description of Artificial Sequence: Synthetic oligonucleotide
aatttcggttttggttcgg

SEQ ID NO: 11755 - DNA, 17 bp, Artificial Sequence
  Description of Artificial Sequence: Synthetic oligonucleotide
acggagattcgtttgga

SEQ ID NO: 11756 - DNA, 22 bp, Artificial Sequence
  Description of Artificial Sequence: Synthetic oligonucleotide
gttctctaataacgatacccga

SEQ ID NO: 11757 - DNA, 18 bp, Artificial Sequence
  Description of Artificial Sequence: Synthetic oligonucleotide
agcggaattcgtattcgg

SEQ ID NO: 11758 - DNA, 18 bp, Artificial Sequence
  Description of Artificial Sequence: Synthetic oligonucleotide
ttcgagttaaagcgaggt

SEQ ID NO: 11759 - DNA, 17 bp, Artificial Sequence
  Description of Artificial Sequence: Synthetic oligonucleotide
gacggagattcgtttgg

SEQ ID NO: 11760 - DNA, 18 bp, Artificial Sequence
  Description of Artificial Sequence: Synthetic oligonucleotide
tttcgagttaaagcgagg

SEQ ID NO: 11761 - DNA, 19 bp, Artificial Sequence
  Description of Artificial Sequence: Synthetic oligonucleotide
tcgctacctaactcacgaa

SEQ ID NO: 11762 - DNA, 17 bp, Artificial Sequence
  Description of Artificial Sequence: Synthetic oligonucleotide
tctaacgaaccgcgtct

SEQ ID NO: 11763 - DNA, 21 bp, Artificial Sequence
  Description of Artificial Sequence: Synthetic oligonucleotide
tgggtcgttttcgtttatatc

SEQ ID NO: 11764 - DNA, 17 bp, Artificial Sequence
  Description of Artificial Sequence: Synthetic oligonucleotide
ttcgccgaccttctaac

SEQ ID NO: 11765 - DNA, 21 bp, Artificial Sequence
  Description of Artificial Sequence: Synthetic oligonucleotide
acgcgacctaactaaactaca

SEQ ID NO: 11766 - DNA, 16 bp, Artificial Sequence
  Description of Artificial Sequence: Synthetic oligonucleotide
ggagacgcggttcgtt

SEQ ID NO: 11767 - DNA, 20 bp, Artificial Sequence
  Description of Artificial Sequence: Synthetic oligonucleotide
gaatacgaaaaccaccgaaa

SEQ ID NO: 11768 - DNA, 20 bp, Artificial Sequence
  Description of Artificial Sequence: Synthetic oligonucleotide
acgtaaataacgcaaacacc

SEQ ID NO: 11769 - DNA, 18 bp, Artificial Sequence
  Description of Artificial Sequence: Synthetic oligonucleotide
gaatacgaaaaccaccga

SEQ ID NO: 11770 - DNA, 18 bp, Artificial Sequence
  Description of Artificial Sequence: Synthetic oligonucleotide
taaaagtcgggaggatcg

SEQ ID NO: 11771 - DNA, 18 bp, Artificial Sequence
  Description of Artificial Sequence: Synthetic oligonucleotide
agcgcgacggtttgtcgg

SEQ ID NO: 11772 - DNA, 19 bp, Artificial Sequence
  Description of Artificial Sequence: Synthetic oligonucleotide
gtaaaagtcgggaggatcg

SEQ ID NO: 11773 - DNA, 18 bp, Artificial Sequence
  Description of Artificial Sequence: Synthetic oligonucleotide
tttcgccgaccttctaac

SEQ ID NO: 11774 - DNA, 21 bp, Artificial Sequence
  Description of Artificial Sequence: Synthetic oligonucleotide
ttcgtattttacgtgttttgc

SEQ ID NO: 11775 - DNA, 21 bp, Artificial Sequence
  Description of Artificial Sequence: Synthetic oligonucleotide
aaactccgaaataccgataac

SEQ ID NO: 11776 - DNA, 18 bp, Artificial Sequence
  Description of Artificial Sequence: Synthetic oligonucleotide
tattcggggtaaaagtcg

SEQ ID NO: 11777 - DNA, 19 bp, Artificial Sequence
  Description of Artificial Sequence: Synthetic oligonucleotide
ccgatattcttcctcgcta

SEQ ID NO: 11778 - DNA, 19 bp, Artificial Sequence
  Description of Artificial Sequence: Synthetic oligonucleotide
ctacgcgataacacaacct

SEQ ID NO: 11779 - DNA, 22 bp, Artificial Sequence
  Description of Artificial Sequence: Synthetic oligonucleotide
tcggttttagttttattacgga

SEQ ID NO: 11780 - DNA, 19 bp, Artificial Sequence
  Description of Artificial Sequence: Synthetic oligonucleotide
tgcggtttcgtttgagcgg

SEQ ID NO: 11781 - DNA, 16 bp, Artificial Sequence
  Description of Artificial Sequence: Synthetic oligonucleotide
gacgtgggtggcgtaa

SEQ ID NO: 11782 - DNA, 18 bp, Artificial Sequence
  Description of Artificial Sequence: Synthetic oligonucleotide
gaacccctacgcgataac

SEQ ID NO: 11783 - DNA, 22 bp, Artificial Sequence
  Description of Artificial Sequence: Synthetic oligonucleotide
cggttttagttttattacggat

SEQ ID NO: 11784 - DNA, 22 bp, Artificial Sequence
  Description of Artificial Sequence: Synthetic oligonucleotide
ttcggttttagttttattacgg

SEQ ID NO: 11785 - DNA, 20 bp, Artificial Sequence
  Description of Artificial Sequence: Synthetic oligonucleotide
cctacgcgataacacaacct

SEQ ID NO: 11786 - DNA, 20 bp, Artificial Sequence
  Description of Artificial Sequence: Synthetic oligonucleotide
tggcgttatcgagatgttat

SEQ ID NO: 11787 - DNA, 22 bp, Artificial Sequence
  Description of Artificial Sequence: Synthetic oligonucleotide
tcgaacactaaacgaaaaacta

SEQ ID NO: 11788 - DNA, 16 bp, Artificial Sequence
  Description of Artificial Sequence: Synthetic oligonucleotide
tacgttttgcgagcgt

SEQ ID NO: 11789 - DNA, 17 bp, Artificial Sequence
  Description of Artificial Sequence: Synthetic oligonucleotide
atcgagtgtgcgatttg

SEQ ID NO: 11790 - DNA, 21 bp, Artificial Sequence
  Description of Artificial Sequence: Synthetic oligonucleotide
ttggcgttatcgagatgttat

SEQ ID NO: 11791 - DNA, 22 bp, Artificial Sequence
  Description of Artificial Sequence: Synthetic oligonucleotide
tttggcgttatcgagatgttat

SEQ ID NO: 11792 - DNA, 20 bp, Artificial Sequence
  Description of Artificial Sequence: Synthetic oligonucleotide
acaatacgacgataaacgct

SEQ ID NO: 11793 - DNA, 20 bp, Artificial Sequence
  Description of Artificial Sequence: Synthetic oligonucleotide
ggttagtcgtgtcggtttta

SEQ ID NO: 11794 - DNA, 21 bp, Artificial Sequence
  Description of Artificial Sequence: Synthetic oligonucleotide
gtcgagataggtgttcgcgtt

SEQ ID NO: 11795 - DNA, 24 bp, Artificial Sequence
  Description of Artificial Sequence: Synthetic oligonucleotide
taatttaaggttgtttagatagat

SEQ ID NO: 11796 - DNA, 22 bp, Artificial Sequence
  Description of Artificial Sequence: Synthetic oligonucleotide
gtattttagacgtgaacgagtg

SEQ ID NO: 11797 - DNA, 20 bp, Artificial Sequence
  Description of Artificial Sequence: Synthetic oligonucleotide
aatacgaaccgaaacaaaaa

SEQ ID NO: 11798 - DNA, 19 bp, Artificial Sequence
  Description of Artificial Sequence: Synthetic oligonucleotide
atcgattcggatttcgcgg

SEQ ID NO: 11799 - DNA, 23 bp, Artificial Sequence
  Description of Artificial Sequence: Synthetic oligonucleotide
ggcgagtgttttaatattgacgg

SEQ ID NO: 11800 - DNA, 22 bp, Artificial Sequence
  Description of Artificial Sequence: Synthetic oligonucleotide
tattttagacgtgaacgagtgt

SEQ ID NO: 11801 - DNA, 20 bp, Artificial Sequence
  Description of Artificial Sequence: Synthetic oligonucleotide
gaatacgaaccgaaacaaaa

SEQ ID NO: 11802 - DNA, 21 bp, Artificial Sequence
  Description of Artificial Sequence: Synthetic oligonucleotide
attttagacgtgaacgagtgt

SEQ ID NO: 11803 - DNA, 21 bp, Artificial Sequence
  Description of Artificial Sequence: Synthetic oligonucleotide
tttagacgtgaacgagtgttt

SEQ ID NO: 11804 - DNA, 19 bp, Artificial Sequence
  Description of Artificial Sequence: Synthetic oligonucleotide
aatcaacccgaatacgaac

SEQ ID NO: 11805 - DNA, 21 bp, Artificial Sequence
  Description of Artificial Sequence: Synthetic oligonucleotide
ggtttcgtgatttcgtttaat

SEQ ID NO: 11806 - DNA, 20 bp, Artificial Sequence
  Description of Artificial Sequence: Synthetic oligonucleotide
taaaacactcgccgtaaaaa

SEQ ID NO: 11807 - DNA, 18 bp, Artificial Sequence
  Description of Artificial Sequence: Synthetic oligonucleotide
ttcgcgtattttagacgt

SEQ ID NO: 11808 - DNA, 16 bp, Artificial Sequence
  Description of Artificial Sequence: Synthetic oligonucleotide
agtgtttggagggcga

SEQ ID NO: 11809 - DNA, 20 bp, Artificial Sequence
  Description of Artificial Sequence: Synthetic oligonucleotide
ttaaaacactcgccgtaaaa

SEQ ID NO: 11810 - DNA, 21 bp, Artificial Sequence
  Description of Artificial Sequence: Synthetic oligonucleotide
gtagacgttgacgagtgtagc

SEQ ID NO: 11811 - DNA, 18 bp, Artificial Sequence
  Description of Artificial Sequence: Synthetic oligonucleotide
aaaaacgaaatccgaacc

SEQ ID NO: 11812 - DNA, 18 bp, Artificial Sequence
  Description of Artificial Sequence: Synthetic oligonucleotide
atcgacggttttttcgag

SEQ ID NO: 11813 - DNA, 19 bp, Artificial Sequence
  Description of Artificial Sequence: Synthetic oligonucleotide
aggaggatttttgttagag

SEQ ID NO: 11814 - DNA, 18 bp, Artificial Sequence
  Description of Artificial Sequence: Synthetic oligonucleotide
cgaatacgaaccgaaaca

SEQ ID NO: 11815 - DNA, 18 bp, Artificial Sequence
  Description of Artificial Sequence: Synthetic oligonucleotide
accgaaacgaaacctctc

SEQ ID NO: 11816 - DNA, 17 bp, Artificial Sequence
  Description of Artificial Sequence: Synthetic oligonucleotide
ttcgggatatcgcgttg

SEQ ID NO: 11817 - DNA, 18 bp, Artificial Sequence
  Description of Artificial Sequence: Synthetic oligonucleotide
aaccgaaacgaaacctct

SEQ ID NO: 11818 - DNA, 20 bp, Artificial Sequence
  Description of Artificial Sequence: Synthetic oligonucleotide
ttttagacgtgaacgagtgt

SEQ ID NO: 11819 - DNA, 21 bp, Artificial Sequence
  Description of Artificial Sequence: Synthetic oligonucleotide
ctcctcaaacgtaaacgaata

SEQ ID NO: 11820 - DNA, 22 bp, Artificial Sequence
  Description of Artificial Sequence: Synthetic oligonucleotide
aggatcgtagtttcggatatag

SEQ ID NO: 11821 - DNA, 16 bp, Artificial Sequence
  Description of Artificial Sequence: Synthetic oligonucleotide
agcgttgcgattcgta

SEQ ID NO: 11822 - DNA, 16 bp, Artificial Sequence
  Description of Artificial Sequence: Synthetic oligonucleotide
ggtaggagtcgggaga

SEQ ID NO: 11823 - DNA, 22 bp, Artificial Sequence
  Description of Artificial Sequence: Synthetic oligonucleotide
tctcctcaaacgtaaacgaata

SEQ ID NO: 11824 - DNA, 20 bp, Artificial Sequence
  Description of Artificial Sequence: Synthetic oligonucleotide
ctcctcaaacgtaaacgaat

SEQ ID NO: 11825 - DNA, 22 bp, Artificial Sequence
  Description of Artificial Sequence: Synthetic oligonucleotide
gtagtttcggatatagcggtag

SEQ ID NO: 11826 - DNA, 16 bp, Artificial Sequence
  Description of Artificial Sequence: Synthetic oligonucleotide
tgggtttcgttcgcga

SEQ ID NO: 11827 - DNA, 21 bp, Artificial Sequence
  Description of Artificial Sequence: Synthetic oligonucleotide
tctcctcaaacgtaaacgaat

SEQ ID NO: 11828 - DNA, 22 bp, Artificial Sequence
  Description of Artificial Sequence: Synthetic oligonucleotide
ctctcctcaaacgtaaacgaat

SEQ ID NO: 11829 - DNA, 21 bp, Artificial Sequence
  Description of Artificial Sequence: Synthetic oligonucleotide
acgacgaatacctcaacacta

SEQ ID NO: 11830 - DNA, 20 bp, Artificial Sequence
  Description of Artificial Sequence: Synthetic oligonucleotide
taggattagttcgggtacga

SEQ ID NO: 11831 - DNA, 18 bp, Artificial Sequence
  Description of Artificial Sequence: Synthetic oligonucleotide
aggtttcgcggggttcgg

SEQ ID NO: 11832 - DNA, 18 bp, Artificial Sequence
  Description of Artificial Sequence: Synthetic oligonucleotide
ggtagttaggggtataag

SEQ ID NO: 11833 - DNA, 20 bp, Artificial Sequence
  Description of Artificial Sequence: Synthetic oligonucleotide
tcctcaaacgtaaacgaata

SEQ ID NO: 11834 - DNA, 17 bp, Artificial Sequence
  Description of Artificial Sequence: Synthetic oligonucleotide
ggagtcgggagagtttt

SEQ ID NO: 11835 - DNA, 21 bp, Artificial Sequence
  Description of Artificial Sequence: Synthetic oligonucleotide
ttaggattagttcgggtacga

SEQ ID NO: 11836 - DNA, 20 bp, Artificial Sequence
  Description of Artificial Sequence: Synthetic oligonucleotide
caaacgtaaacgaatatcgc

SEQ ID NO: 11837 - DNA, 21 bp, Artificial Sequence
  Description of Artificial Sequence: Synthetic oligonucleotide
tctctcctcaaacgtaaacga

SEQ ID NO: 11838 - DNA, 16 bp, Artificial Sequence
  Description of Artificial Sequence: Synthetic oligonucleotide
gggtttcgttcgcgat

SEQ ID NO: 11839 - DNA, 22 bp, Artificial Sequence
  Description of Artificial Sequence: Synthetic oligonucleotide
ctctctcctcaaacgtaaacga

SEQ ID NO: 11840 - DNA, 20 bp, Artificial Sequence
  Description of Artificial Sequence: Synthetic oligonucleotide
cgactcctaccgctatatcc

SEQ ID NO: 11841 - DNA, 22 bp, Artificial Sequence
  Description of Artificial Sequence: Synthetic oligonucleotide
ggagtagtttttagtatcgcgt

SEQ ID NO: 11842 - DNA, 17 bp, Artificial Sequence
  Description of Artificial Sequence: Synthetic oligonucleotide
agcgttagcgaaggcgg

SEQ ID NO: 11843 - DNA, 22 bp, Artificial Sequence
  Description of Artificial Sequence: Synthetic oligonucleotide
ttcgcgtggtatttaggatcgt

SEQ ID NO: 11844 - DNA, 21 bp, Artificial Sequence
  Description of Artificial Sequence: Synthetic oligonucleotide
ggatcgtagtttcggatatag

SEQ ID NO: 11845 - DNA, 19 bp, Artificial Sequence
  Description of Artificial Sequence: Synthetic oligonucleotide
aggattagttcgggtacga

SEQ ID NO: 11846 - DNA, 21 bp, Artificial Sequence
  Description of Artificial Sequence: Synthetic oligonucleotide
tagtttcggatatagcggtag

SEQ ID NO: 11847 - DNA, 20 bp, Artificial Sequence
  Description of Artificial Sequence: Synthetic oligonucleotide
tacttccctcacgacgaata

SEQ ID NO: 11848 - DNA, 21 bp, Artificial Sequence
  Description of Artificial Sequence: Synthetic oligonucleotide
gttaggattagttcgggtacg

SEQ ID NO: 11849 - DNA, 17 bp, Artificial Sequence
  Description of Artificial Sequence: Synthetic oligonucleotide
aggagtcgggagagttt

SEQ ID NO: 11850 - DNA, 21 bp, Artificial Sequence
  Description of Artificial Sequence: Synthetic oligonucleotide
tcaaacgtaaacgaatatcgc

SEQ ID NO: 11851 - DNA, 23 bp, Artificial Sequence
  Description of Artificial Sequence: Synthetic oligonucleotide
agtttttagtatcgcgttgtaag

SEQ ID NO: 11852 - DNA, 21 bp, Artificial Sequence
  Description of Artificial Sequence: Synthetic oligonucleotide
ctacttccctcacgacgaata

SEQ ID NO: 11853 - DNA, 21 bp, Artificial Sequence
  Description of Artificial Sequence: Synthetic oligonucleotide
ttttagtatcgcgttgtaagc

SEQ ID NO: 11854 - DNA, 24 bp, Artificial Sequence
  Description of Artificial Sequence: Synthetic oligonucleotide
gttcgcgtggtatttaggatcgta

SEQ ID NO: 11855 - DNA, 16 bp, Artificial Sequence
  Description of Artificial Sequence: Synthetic oligonucleotide
aaggcgggtgggggta

SEQ ID NO: 11856 - DNA, 22 bp, Artificial Sequence
  Description of Artificial Sequence: Synthetic oligonucleotide
gtttttagtatcgcgttgtaag

SEQ ID NO: 11857 - DNA, 19 bp, Artificial Sequence
  Description of Artificial Sequence: Synthetic oligonucleotide
tatacgaatcgcaacgcta

SEQ ID NO: 11858 - DNA, 22 bp, Artificial Sequence
  Description of Artificial Sequence: Synthetic oligonucleotide
tttatcgttataggtgttttcg

SEQ ID NO: 11859 - DNA, 18 bp, Artificial Sequence
  Description of Artificial Sequence: Synthetic oligonucleotide
ggatatagcggtaggagt

SEQ ID NO: 11860 - DNA, 22 bp, Artificial Sequence
  Description of Artificial Sequence: Synthetic oligonucleotide
tctctcctcaaacgtaaacgaa

SEQ ID NO: 11861 - DNA, 23 bp, Artificial Sequence
  Description of Artificial Sequence: Synthetic oligonucleotide
gtttatcgttataggtgttttcg

SEQ ID NO: 11862 - DNA, 22 bp, Artificial Sequence
  Description of Artificial Sequence: Synthetic oligonucleotide
ttatcgttataggtgttttcgg

SEQ ID NO: 11863 - DNA, 23 bp, Artificial Sequence
  Description of Artificial Sequence: Synthetic oligonucleotide
gagtagtttttagtatcgcgttg

SEQ ID NO: 11864 - DNA, 22 bp, Artificial Sequence
  Description of Artificial Sequence: Synthetic oligonucleotide
tcctcaaacgtaaacgaatatc

SEQ ID NO: 11865 - DNA, 19 bp, Artificial Sequence
  Description of Artificial Sequence: Synthetic oligonucleotide
cgttataggtgttttcggg

SEQ ID NO: 11866 - DNA, 20 bp, Artificial Sequence
  Description of Artificial Sequence: Synthetic oligonucleotide
ctcacgacgaatacctcaac

SEQ ID NO: 11867 - DNA, 21 bp, Artificial Sequence
  Description of Artificial Sequence: Synthetic oligonucleotide
tatgtacgtttagaggttcgg

SEQ ID NO: 11868 - DNA, 20 bp, Artificial Sequence
  Description of Artificial Sequence: Synthetic oligonucleotide
aaacgataaaaacaccgcta

SEQ ID NO: 11869 - DNA, 18 bp, Artificial Sequence
  Description of Artificial Sequence: Synthetic oligonucleotide
ggcggttttagtacgcga

SEQ ID NO: 11870 - DNA, 22 bp, Artificial Sequence
  Description of Artificial Sequence: Synthetic oligonucleotide
ggataggtattatttgtttttg

SEQ ID NO: 11871 - DNA, 21 bp, Artificial Sequence
  Description of Artificial Sequence: Synthetic oligonucleotide
ggtgtagacgttgtcgtagag

SEQ ID NO: 11872 - DNA, 20 bp, Artificial Sequence
  Description of Artificial Sequence: Synthetic oligonucleotide
cgcatctctaactcgaaaaa

SEQ ID NO: 11873 - DNA, 17 bp, Artificial Sequence
  Description of Artificial Sequence: Synthetic oligonucleotide
ttcgttcgcgtttacgt

SEQ ID NO: 11874 - DNA, 16 bp, Artificial Sequence
  Description of Artificial Sequence: Synthetic oligonucleotide
gttttcgcgacgtcgg

SEQ ID NO: 11875 - DNA, 21 bp, Artificial Sequence
  Description of Artificial Sequence: Synthetic oligonucleotide
aaaacgataaaaacaccgcta

SEQ ID NO: 11876 - DNA, 21 bp, Artificial Sequence
  Description of Artificial Sequence: Synthetic oligonucleotide
gtagacgttgtcgtagagtcg

SEQ ID NO: 11877 - DNA, 22 bp, Artificial Sequence
  Description of Artificial Sequence: Synthetic oligonucleotide
aaaaacgataaaaacaccgcta

SEQ ID NO: 11878 - DNA, 22 bp, Artificial Sequence
  Description of Artificial Sequence: Synthetic oligonucleotide
aaaacaaacgaaaccgatataa

SEQ ID NO: 11879 - DNA, 21 bp, Artificial Sequence
  Description of Artificial Sequence: Synthetic oligonucleotide
attttaagttcgattcggtga

SEQ ID NO: 11880 - DNA, 25 bp, Artificial Sequence
  Description of Artificial Sequence: Synthetic oligonucleotide
tttgtagatttagtgttggttttgg

SEQ ID NO: 11881 - DNA, 20 bp, Artificial Sequence
  Description of Artificial Sequence: Synthetic oligonucleotide
aggaggtttgtttggagcgt

SEQ ID NO: 11882 - DNA, 20 bp, Artificial Sequence
  Description of Artificial Sequence: Synthetic oligonucleotide
aaacgaccataacgatcaat

SEQ ID NO: 11883 - DNA, 22 bp, Artificial Sequence
  Description of Artificial Sequence: Synthetic oligonucleotide
gcgttgtttttcgtagatttag

SEQ ID NO: 11884 - DNA, 25 bp, Artificial Sequence
  Description of Artificial Sequence: Synthetic oligonucleotide
ttcggtatgcgtttttttatatcgg

SEQ ID NO: 11885 - DNA, 19 bp, Artificial Sequence
  Description of Artificial Sequence: Synthetic oligonucleotide
tggagtatttattttgcgg

SEQ ID NO: 11886 - DNA, 20 bp, Artificial Sequence
  Description of Artificial Sequence: Synthetic oligonucleotide
ttttaagttcgattcggtga

SEQ ID NO: 11887 - DNA, 22 bp, Artificial Sequence
  Description of Artificial Sequence: Synthetic oligonucleotide
gattttaagttcgattcggtga

SEQ ID NO: 11888 - DNA, 21 bp, Artificial Sequence
  Description of Artificial Sequence: Synthetic oligonucleotide
aaacaaacgaaaccgatataa

SEQ ID NO: 11889 - DNA, 21 bp, Artificial Sequence
  Description of Artificial Sequence: Synthetic oligonucleotide
agcgttgtttttcgtagattt

SEQ ID NO: 11890 - DNA, 19 bp, Artificial Sequence
  Description of Artificial Sequence: Synthetic oligonucleotide
tttaagttcgattcggtga

SEQ ID NO: 11891 - DNA, 20 bp, Artificial Sequence
  Description of Artificial Sequence: Synthetic oligonucleotide
gaaaacgaccataacgatca

SEQ ID NO: 11892 - DNA, 22 bp, Artificial Sequence
  Description of Artificial Sequence: Synthetic oligonucleotide
tgtttttcgtagatttagcgtc

SEQ ID NO: 11893 - DNA, 20 bp, Artificial Sequence
  Description of Artificial Sequence: Synthetic oligonucleotide
gagcgttgtttttcgtagat

SEQ ID NO: 11894 - DNA, 24 bp, Artificial Sequence
  Description of Artificial Sequence: Synthetic oligonucleotide
ccgaacgtacaacttaataaaaat

SEQ ID NO: 11895 - DNA, 21 bp, Artificial Sequence
  Description of Artificial Sequence: Synthetic oligonucleotide
ttatatcggtttcgtttgttt

SEQ ID NO: 11896 - DNA, 16 bp, Artificial Sequence
  Description of Artificial Sequence: Synthetic oligonucleotide
atggtcgttttcgcgt

SEQ ID NO: 11897 - DNA, 22 bp, Artificial Sequence
  Description of Artificial Sequence: Synthetic oligonucleotide
ggtttatatgagatttagattg

SEQ ID NO: 11898 - DNA, 22 bp, Artificial Sequence
  Description of Artificial Sequence: Synthetic oligonucleotide
gtagtttcgcggtttatagagg

SEQ ID NO: 11899 - DNA, 22 bp, Artificial Sequence
  Description of Artificial Sequence: Synthetic oligonucleotide
gataatacgaacgaccaaaact

SEQ ID NO: 11900 - DNA, 16 bp, Artificial Sequence
  Description of Artificial Sequence: Synthetic oligonucleotide
gagtcgcgttgcgcgg

SEQ ID NO: 11901 - DNA, 20 bp, Artificial Sequence
  Description of Artificial Sequence: Synthetic oligonucleotide
gtcgaggttttgtagttcgg

SEQ ID NO: 11902 - DNA, 22 bp, Artificial Sequence
  Description of Artificial Sequence: Synthetic oligonucleotide
tagtttcgcggtttatagaggt

SEQ ID NO: 11903 - DNA, 22 bp, Artificial Sequence
  Description of Artificial Sequence: Synthetic oligonucleotide
ggtagtttcgcggtttatagag

SEQ ID NO: 11904 - DNA, 22 bp, Artificial Sequence
  Description of Artificial Sequence: Synthetic oligonucleotide
gtcgtttttagatcgtgatttt

SEQ ID NO: 11905 - DNA, 20 bp, Artificial Sequence
  Description of Artificial Sequence: Synthetic oligonucleotide
acaatcgaacgcactaactc

SEQ ID NO: 11906 - DNA, 21 bp, Artificial Sequence
  Description of Artificial Sequence: Synthetic oligonucleotide
ttcgcgtcgttttttgtcgga

SEQ ID NO: 11907 - DNA, 16 bp, Artificial Sequence
  Description of Artificial Sequence: Synthetic oligonucleotide
aagttttgcgggcggg

SEQ ID NO: 11908 - DNA, 20 bp, Artificial Sequence
  Description of Artificial Sequence: Synthetic oligonucleotide
gtttcgcggtttatagaggt

SEQ ID NO: 11909 - DNA, 19 bp, Artificial Sequence
  Description of Artificial Sequence: Synthetic oligonucleotide
tttcgcggtttatagaggt

SEQ ID NO: 11910 - DNA, 22 bp, Artificial Sequence
  Description of Artificial Sequence: Synthetic oligonucleotide
atacgaacgaccaaaactaact

SEQ ID NO: 11911 - DNA, 19 bp, Artificial Sequence
  Description of Artificial Sequence: Synthetic oligonucleotide
cgcggtttatagaggtttc

SEQ ID NO: 11912 - DNA, 19 bp, Artificial Sequence
  Description of Artificial Sequence: Synthetic oligonucleotide
tcgcggtttatagaggttt

SEQ ID NO: 11913 - DNA, 19 bp, Artificial Sequence
  Description of Artificial Sequence: Synthetic oligonucleotide
ttcgcggtttatagaggtt

SEQ ID NO: 11914 - DNA, 19 bp, Artificial Sequence
  Description of Artificial Sequence: Synthetic oligonucleotide
gcggtttatagaggtttcg

SEQ ID NO: 11915 - DNA, 21 bp, Artificial Sequence
  Description of Artificial Sequence: Synthetic oligonucleotide
agtttcgcggtttatagaggt

SEQ ID NO: 11916 - DNA, 22 bp, Artificial Sequence
  Description of Artificial Sequence: Synthetic oligonucleotide
aatacgaacgaccaaaactaac

SEQ ID NO: 11917 - DNA, 19 bp, Artificial Sequence
  Description of Artificial Sequence: Synthetic oligonucleotide
cggtttatagaggtttcgg

SEQ ID NO: 11918 - DNA, 20 bp, Artificial Sequence
  Description of Artificial Sequence: Synthetic oligonucleotide
tagttttgtatcgttcgggt

SEQ ID NO: 11919 - DNA, 21 bp, Artificial Sequence
  Description of Artificial Sequence: Synthetic oligonucleotide
ctcgataaatcaaaaacgaaa

SEQ ID NO: 11920 - DNA, 16 bp, Artificial Sequence
  Description of Artificial Sequence: Synthetic oligonucleotide
tatcgttttggcgcgt

SEQ ID NO: 11921 - DNA, 21 bp, Artificial Sequence
  Description of Artificial Sequence: Synthetic oligonucleotide
tagataggtgtatgaagattt

SEQ ID NO: 11922 - DNA, 22 bp, Artificial Sequence
  Description of Artificial Sequence: Synthetic oligonucleotide
taggtagtttcgcggtttatag

SEQ ID NO: 11923 - DNA, 20 bp, Artificial Sequence
  Description of Artificial Sequence: Synthetic oligonucleotide
aacgataatacgaacgacca

SEQ ID NO: 11924 - DNA, 21 bp, Artificial Sequence
  Description of Artificial Sequence: Synthetic oligonucleotide
tcgataaatcaaaaacgaaaa

SEQ ID NO: 11925 - DNA, 22 bp, Artificial Sequence
  Description of Artificial Sequence: Synthetic oligonucleotide
taatacgaacgaccaaaactaa

SEQ ID NO: 11926 - DNA, 22 bp, Artificial Sequence
  Description of Artificial Sequence: Synthetic oligonucleotide
tcgtttttagatcgtgattttc

SEQ ID NO: 11927 - DNA, 20 bp, Artificial Sequence
  Description of Artificial Sequence: Synthetic oligonucleotide
ttcgcggtttatagaggttt

SEQ ID NO: 11928 - DNA, 19 bp, Artificial Sequence
  Description of Artificial Sequence: Synthetic oligonucleotide
caatcgaacgcactaactc

SEQ ID NO: 11929 - DNA, 23 bp, Artificial Sequence
  Description of Artificial Sequence: Synthetic oligonucleotide
ataatacgaacgaccaaaactaa

SEQ ID NO: 11930 - DNA, 21 bp, Artificial Sequence
  Description of Artificial Sequence: Synthetic oligonucleotide
aggtagtttcgcggtttatag

SEQ ID NO: 11931 - DNA, 20 bp, Artificial Sequence
  Description of Artificial Sequence: Synthetic oligonucleotide
acgataatacgaacgaccaa

SEQ ID NO: 11932 - DNA, 21 bp, Artificial Sequence
  Description of Artificial Sequence: Synthetic oligonucleotide
cgtttttagatcgtgattttc

SEQ ID NO: 11933 - DNA, 22 bp, Artificial Sequence
  Description of Artificial Sequence: Synthetic oligonucleotide
taaaataaacgaacgaccaata

SEQ ID NO: 11934 - DNA, 21 bp, Artificial Sequence
  Description of Artificial Sequence: Synthetic oligonucleotide
cgtatttcggagaagaagttt

SEQ ID NO: 11935 - DNA, 20 bp, Artificial Sequence
  Description of Artificial Sequence: Synthetic oligonucleotide
ttcgagaaagatgtcgtcgt

SEQ ID NO: 11936 - DNA, 18 bp, Artificial Sequence
  Description of Artificial Sequence: Synthetic oligonucleotide
attttcgtttcggaggtt

SEQ ID NO: 11937 - DNA, 22 bp, Artificial Sequence
  Description of Artificial Sequence: Synthetic oligonucleotide
cttaataaaacctcgatttccg

SEQ ID NO: 11938 - DNA, 22 bp, Artificial Sequence
  Description of Artificial Sequence: Synthetic oligonucleotide
tatatttgtttataggcgcgtt

SEQ ID NO: 11939 - DNA, 20 bp, Artificial Sequence
  Description of Artificial Sequence: Synthetic oligonucleotide
gttggggtttggaagtgtgt

SEQ ID NO: 11940 - DNA, 16 bp, Artificial Sequence
  Description of Artificial Sequence: Synthetic oligonucleotide
ttcgagcggtgtaggg

SEQ ID NO: 11941 - DNA, 21 bp, Artificial Sequence
  Description of Artificial Sequence: Synthetic oligonucleotide
ttaataaaacctcgatttccg

SEQ ID NO: 11942 - DNA, 21 bp, Artificial Sequence
  Description of Artificial Sequence: Synthetic oligonucleotide
cgaaaaactctcctaaacgac

SEQ ID NO: 11943 - DNA, 22 bp, Artificial Sequence
  Description of Artificial Sequence: Synthetic oligonucleotide
tcgtaaagttcggtttaatttg

SEQ ID NO: 11944 - DNA, 17 bp, Artificial Sequence
  Description of Artificial Sequence: Synthetic oligonucleotide
ttcgtaggcgttatcgt

SEQ ID NO: 11945 - DNA, 17 bp, Artificial Sequence
  Description of Artificial Sequence: Synthetic oligonucleotide
ggcgtatttcggagaag

SEQ ID NO: 11946 - DNA, 21 bp, Artificial Sequence
  Description of Artificial Sequence: Synthetic oligonucleotide
ataaaataaacgaacgaccaa

SEQ ID NO: 11947 - DNA, 21 bp, Artificial Sequence
  Description of Artificial Sequence: Synthetic oligonucleotide
aaataaacgaacgaccaataa

SEQ ID NO: 11948 - DNA, 21 bp, Artificial Sequence
  Description of Artificial Sequence: Synthetic oligonucleotide
aaaataaacgaacgaccaata

SEQ ID NO: 11949 - DNA, 21 bp, Artificial Sequence
  Description of Artificial Sequence: Synthetic oligonucleotide
ctcgaaaaactctcctaaacg

SEQ ID NO: 11950 - DNA, 22 bp, Artificial Sequence
  Description of Artificial Sequence: Synthetic oligonucleotide
cgaacgaccaataaaaacataa

SEQ ID NO: 11951 - DNA, 20 bp, Artificial Sequence
  Description of Artificial Sequence: Synthetic oligonucleotide
taataaaacctcgatttccg

SEQ ID NO: 11952 - DNA, 20 bp, Artificial Sequence
  Description of Artificial Sequence: Synthetic oligonucleotide
tcgaaaaactctcctaaacg

SEQ ID NO: 11953 - DNA, 21 bp, Artificial Sequence
  Description of Artificial Sequence: Synthetic oligonucleotide
cgtaaagttcggtttaatttg

SEQ ID NO: 11954 - DNA, 22 bp, Artificial Sequence
  Description of Artificial Sequence: Synthetic oligonucleotide
tatttgtttataggcgcgttag

SEQ ID NO: 11955 - DNA, 20 bp, Artificial Sequence
  Description of Artificial Sequence: Synthetic oligonucleotide
actctaatcgctcgcactac

SEQ ID NO: 11956 - DNA, 23 bp, Artificial Sequence
  Description of Artificial Sequence: Synthetic oligonucleotide
tcgagatttagacgtagattttt

SEQ ID NO: 11957 - DNA, 17 bp, Artificial Sequence
  Description of Artificial Sequence: Synthetic oligonucleotide
agtcgggttcggtgcgt

SEQ ID NO: 11958 - DNA, 18 bp, Artificial Sequence
  Description of Artificial Sequence: Synthetic oligonucleotide
aatttttgttgttcgcgt

SEQ ID NO: 11959 - DNA, 21 bp, Artificial Sequence
  Description of Artificial Sequence: Synthetic oligonucleotide
accgcgactattatacgacta

SEQ ID NO: 11960 - DNA, 20 bp, Artificial Sequence
  Description of Artificial Sequence: Synthetic oligonucleotide
gttcgtgttcggttgttatt

SEQ ID NO: 11961 - DNA, 24 bp, Artificial Sequence
  Description of Artificial Sequence: Synthetic oligonucleotide
ttcgttagttgttttcggagtcga

SEQ ID NO: 11962 - DNA, 19 bp, Artificial Sequence
  Description of Artificial Sequence: Synthetic oligonucleotide
gttttaacgtcgttaggga

SEQ ID NO: 11963 - DNA, 20 bp, Artificial Sequence
  Description of Artificial Sequence: Synthetic oligonucleotide
gcgtatttcggagaagaagt

SEQ ID NO: 11964 - DNA, 20 bp, Artificial Sequence
  Description of Artificial Sequence: Synthetic oligonucleotide
cggttgttattgatcgtttt

SEQ ID NO: 11965 - DNA, 22 bp, Artificial Sequence
  Description of Artificial Sequence: Synthetic oligonucleotide
ttcggagtcgagtaggtttcga

SEQ ID NO: 11966 - DNA, 18 bp, Artificial Sequence
  Description of Artificial Sequence: Synthetic oligonucleotide
gggacgattcgttagttg

SEQ ID NO: 11967 - DNA, 21 bp, Artificial Sequence
  Description of Artificial Sequence: Synthetic oligonucleotide
atatttgtttataggcgcgtt

SEQ ID NO: 11968 - DNA, 22 bp, Artificial Sequence
  Description of Artificial Sequence: Synthetic oligonucleotide
taaaacgatcaataacaaccga

SEQ ID NO: 11969 - DNA, 21 bp, Artificial Sequence
  Description of Artificial Sequence: Synthetic oligonucleotide
gtatttttcggtaagagacgg

SEQ ID NO: 11970 - DNA, 17 bp, Artificial Sequence
  Description of Artificial Sequence: Synthetic oligonucleotide
gattcgggcgattcggt

SEQ ID NO: 11971 - DNA, 17 bp, Artificial Sequence
  Description of Artificial Sequence: Synthetic oligonucleotide
ttcgggagttacggttt

SEQ ID NO: 11972 - DNA, 19 bp, Artificial Sequence
  Description of Artificial Sequence: Synthetic oligonucleotide
aacctaaccgtaaaaacgc

SEQ ID NO: 11973 - DNA, 22 bp, Artificial Sequence
  Description of Artificial Sequence: Synthetic oligonucleotide
gggtcgtaagttttatagtcgt

SEQ ID NO: 11974 - DNA, 18 bp, Artificial Sequence
  Description of Artificial Sequence: Synthetic oligonucleotide
agcgcgttcggaaatcga

SEQ ID NO: 11975 - DNA, 21 bp, Artificial Sequence
  Description of Artificial Sequence: Synthetic oligonucleotide
ttaagttttagattgcgattt

SEQ ID NO: 11976 - DNA, 22 bp, Artificial Sequence
  Description of Artificial Sequence: Synthetic oligonucleotide
aatacgaacctaaccgtaaaaa

SEQ ID NO: 11977 - DNA, 22 bp, Artificial Sequence
  Description of Artificial Sequence: Synthetic oligonucleotide
ggtcgtaagttttatagtcgta

SEQ ID NO: 11978 - DNA, 22 bp, Artificial Sequence
  Description of Artificial Sequence: Synthetic oligonucleotide
tctcgaaaaactctcctaaacg

SEQ ID NO: 11979 - DNA, 21 bp, Artificial Sequence
  Description of Artificial Sequence: Synthetic oligonucleotide
aactctaatcgctcgcactac

SEQ ID NO: 11980 - DNA, 20 bp, Artificial Sequence
  Description of Artificial Sequence: Synthetic oligonucleotide
gaacctaaccgtaaaaacgc

SEQ ID NO: 11981 - DNA, 22 bp, Artificial Sequence
  Description of Artificial Sequence: Synthetic oligonucleotide
aaattaaaccgaactttacgaa

SEQ ID NO: 11982 - DNA, 18 bp, Artificial Sequence
  Description of Artificial Sequence: Synthetic oligonucleotide
ttgggttaagtcgcgtag

SEQ ID NO: 11983 - DNA, 27 bp, Artificial Sequence
  Description of Artificial Sequence: Synthetic oligonucleotide
gtcgcgaagttgtttaaatttcgtatt

SEQ ID NO: 11984 - DNA, 20 bp, Artificial Sequence
  Description of Artificial Sequence: Synthetic oligonucleotide
aggttttgatttatcgttgt

SEQ ID NO: 11985 - DNA, 21 bp, Artificial Sequence
  Description of Artificial Sequence: Synthetic oligonucleotide
gttcggttgttattgatcgtt

SEQ ID NO: 11986 - DNA, 22 bp, Artificial Sequence
  Description of Artificial Sequence: Synthetic oligonucleotide
caccgcgactattatacgacta

SEQ ID NO: 11987 - DNA, 20 bp, Artificial Sequence
  Description of Artificial Sequence: Synthetic oligonucleotide
ttcggttgttattgatcgtt

SEQ ID NO: 11988 - DNA, 20 bp, Artificial Sequence
  Description of Artificial Sequence: Synthetic oligonucleotide
aaacgatcaataacaaccga

SEQ ID NO: 11989 - DNA, 21 bp, Artificial Sequence
  Description of Artificial Sequence: Synthetic oligonucleotide
taaaacgatcaataacaaccg

SEQ ID NO: 11990 - DNA, 21 bp, Artificial Sequence
  Description of Artificial Sequence: Synthetic oligonucleotide
attcgtatttttcggtaagag

SEQ ID NO: 11991 - DNA, 21 bp, Artificial Sequence
  Description of Artificial Sequence: Synthetic oligonucleotide
taaacgaacgaccaataaaaa

SEQ ID NO: 11992 - DNA, 22 bp, Artificial Sequence
  Description of Artificial Sequence: Synthetic oligonucleotide
ccgcgactattatacgactaaa

SEQ ID NO: 11993 - DNA, 20 bp, Artificial Sequence
  Description of Artificial Sequence: Synthetic oligonucleotide
cgtgttcggttgttattgat

SEQ ID NO: 11994 - DNA, 21 bp, Artificial Sequence
  Description of Artificial Sequence: Synthetic oligonucleotide
atttgtttataggcgcgttag

SEQ ID NO: 11995 - DNA, 20 bp, Artificial Sequence
  Description of Artificial Sequence: Synthetic oligonucleotide
acgaacctaaccgtaaaaac

SEQ ID NO: 11996 - DNA, 22 bp, Artificial Sequence
  Description of Artificial Sequence: Synthetic oligonucleotide
tgggtcgtaagttttatagtcg

SEQ ID NO: 11997 - DNA, 19 bp, Artificial Sequence
  Description of Artificial Sequence: Synthetic oligonucleotide
aataaaacctcgatttccg

SEQ ID NO: 11998 - DNA, 22 bp, Artificial Sequence
  Description of Artificial Sequence: Synthetic oligonucleotide
acgaacgaccaataaaaacata

SEQ ID NO: 11999 - DNA, 22 bp, Artificial Sequence
  Description of Artificial Sequence: Synthetic oligonucleotide
cgagatttagacgtagattttt

SEQ ID NO: 12000 - DNA, 20 bp, Artificial Sequence
  Description of Artificial Sequence: Synthetic oligonucleotide
tatttttcggtaagagacgg

SEQ ID NO: 12001 - DNA, 21 bp, Artificial Sequence
  Description of Artificial Sequence: Synthetic oligonucleotide
cgaacgaccaataaaaacata

SEQ ID NO: 12002 - DNA, 22 bp, Artificial Sequence
  Description of Artificial Sequence: Synthetic oligonucleotide
ttaaaacgatcaataacaaccg

SEQ ID NO: 12003 - DNA, 21 bp, Artificial Sequence
  Description of Artificial Sequence: Synthetic oligonucleotide
tcggttgttattgatcgtttt

SEQ ID NO: 12004 - DNA, 23 bp, Artificial Sequence
  Description of Artificial Sequence: Synthetic oligonucleotide
acttaataaaacctcgatttccg

SEQ ID NO: 12005 - DNA, 21 bp, Artificial Sequence
  Description of Artificial Sequence: Synthetic oligonucleotide
aaaacgatcaataacaaccga

SEQ ID NO: 12006 - DNA, 20 bp, Artificial Sequence
  Description of Artificial Sequence: Synthetic oligonucleotide
gttttcggtgtaagtcgttg

SEQ ID NO: 12007 - DNA, 22 bp, Artificial Sequence
  Description of Artificial Sequence: Synthetic oligonucleotide
acatctaacaatctcgtcgaac

SEQ ID NO: 12008 - DNA, 16 bp, Artificial Sequence
  Description of Artificial Sequence: Synthetic oligonucleotide
aacgagacgggggcgt

SEQ ID NO: 12009 - DNA, 27 bp, Artificial Sequence
  Description of Artificial Sequence: Synthetic oligonucleotide
ttcggattttgtagcgcggtatttcgg

SEQ ID NO: 12010 - DNA, 21 bp, Artificial Sequence
  Description of Artificial Sequence: Synthetic oligonucleotide
catctaacaatctcgtcgaac

SEQ ID NO: 12011 - DNA, 19 bp, Artificial Sequence
  Description of Artificial Sequence: Synthetic oligonucleotide
attcgagcgtagcgtttat

SEQ ID NO: 12012 - DNA, 22 bp, Artificial Sequence
  Description of Artificial Sequence: Synthetic oligonucleotide
cgttaaatacccaacgacttac

SEQ ID NO: 12013 - DNA, 17 bp, Artificial Sequence
  Description of Artificial Sequence: Synthetic oligonucleotide
ggttttcgcgtttcgaa

SEQ ID NO: 12014 - DNA, 17 bp, Artificial Sequence
  Description of Artificial Sequence: Synthetic oligonucleotide
gtcgggattcggtttga

SEQ ID NO: 12015 - DNA, 19 bp, Artificial Sequence
  Description of Artificial Sequence: Synthetic oligonucleotide
ggttttcggtgtaagtcgt

SEQ ID NO: 12016 - DNA, 19 bp, Artificial Sequence
  Description of Artificial Sequence: Synthetic oligonucleotide
ttttcggtgtaagtcgttg

SEQ ID NO: 12017 - DNA, 19 bp, Artificial Sequence
  Description of Artificial Sequence: Synthetic oligonucleotide
acgtttcggattttgtagc

SEQ ID NO: 12018 - DNA, 18 bp, Artificial Sequence
  Description of Artificial Sequence: Synthetic oligonucleotide
ttcgggttatcgattcgg

SEQ ID NO: 12019 - DNA, 16 bp, Artificial Sequence
  Description of Artificial Sequence: Synthetic oligonucleotide
aaaggtcggcgggttt

SEQ ID NO: 12020 - DNA, 21 bp, Artificial Sequence
  Description of Artificial Sequence: Synthetic oligonucleotide
atctaacaatctcgtcgaacc

SEQ ID NO: 12021 - DNA, 18 bp, Artificial Sequence
  Description of Artificial Sequence: Synthetic oligonucleotide
tcgagcgtagcgtttatc

SEQ ID NO: 12022 - DNA, 18 bp, Artificial Sequence
  Description of Artificial Sequence: Synthetic oligonucleotide
tagcgtttatcgcgtttc

SEQ ID NO: 12023 - DNA, 19 bp, Artificial Sequence
  Description of Artificial Sequence: Synthetic oligonucleotide
gtagcgtttatcgcgtttc

SEQ ID NO: 12024 - DNA, 20 bp, Artificial Sequence
  Description of Artificial Sequence: Synthetic oligonucleotide
gattcgagcgtagcgtttat

SEQ ID NO: 12025 - DNA, 18 bp, Artificial Sequence
  Description of Artificial Sequence: Synthetic oligonucleotide
ttcgagcgtagcgtttat

SEQ ID NO: 12026 - DNA, 19 bp, Artificial Sequence
  Description of Artificial Sequence: Synthetic oligonucleotide
ggacgtttcggattttgta

SEQ ID NO: 12027 - DNA, 22 bp, Artificial Sequence
  Description of Artificial Sequence: Synthetic oligonucleotide
aaacctataactacgtccgaaa

SEQ ID NO: 12028 - DNA, 22 bp, Artificial Sequence
  Description of Artificial Sequence: Synthetic oligonucleotide
ttttggtttacgttcgtttatt

SEQ ID NO: 12029 - DNA, 17 bp, Artificial Sequence
  Description of Artificial Sequence: Synthetic oligonucleotide
gttcgcggtcgttttta

SEQ ID NO: 12030 - DNA, 18 bp, Artificial Sequence
  Description of Artificial Sequence: Synthetic oligonucleotide
agcgtttttaattagcgg

SEQ ID NO: 12031 - DNA, 22 bp, Artificial Sequence
  Description of Artificial Sequence: Synthetic oligonucleotide
aaaacctataactacgtccgaa

SEQ ID NO: 12032 - DNA, 22 bp, Artificial Sequence
  Description of Artificial Sequence: Synthetic oligonucleotide
tttggtttacgttcgtttattc

SEQ ID NO: 12033 - DNA, 21 bp, Artificial Sequence
  Description of Artificial Sequence: Synthetic oligonucleotide
ttggtttacgttcgtttattc

SEQ ID NO: 12034 - DNA, 22 bp, Artificial Sequence
  Description of Artificial Sequence: Synthetic oligonucleotide
aacacgtctactaactaacgcc

SEQ ID NO: 12035 - DNA, 21 bp, Artificial Sequence
  Description of Artificial Sequence: Synthetic oligonucleotide
tttcgtttttgtttagattcg

SEQ ID NO: 12036 - DNA, 19 bp, Artificial Sequence
  Description of Artificial Sequence: Synthetic oligonucleotide
tacgttcgtttattcgcgt

SEQ ID NO: 12037 - DNA, 20 bp, Artificial Sequence
  Description of Artificial Sequence: Synthetic oligonucleotide
aagtcgttgtttttttggga

SEQ ID NO: 12038 - DNA, 21 bp, Artificial Sequence
  Description of Artificial Sequence: Synthetic oligonucleotide
tttggtttacgttcgtttatt

SEQ ID NO: 12039 - DNA, 21 bp, Artificial Sequence
  Description of Artificial Sequence: Synthetic oligonucleotide
cgtttgagtagcgtttttaat

SEQ ID NO: 12040 - DNA, 17 bp, Artificial Sequence
  Description of Artificial Sequence: Synthetic oligonucleotide
ttcgcggtcgtttttaa

SEQ ID NO: 12041 - DNA, 19 bp, Artificial Sequence
  Description of Artificial Sequence: Synthetic oligonucleotide
ggcgttagttagtagacgt

SEQ ID NO: 12042 - DNA, 22 bp, Artificial Sequence
  Description of Artificial Sequence: Synthetic oligonucleotide
tcaaaacctataactacgtccg

SEQ ID NO: 12043 - DNA, 22 bp, Artificial Sequence
  Description of Artificial Sequence: Synthetic oligonucleotide
acctataactacgtccgaaaat

SEQ ID NO: 12044 - DNA, 20 bp, Artificial Sequence
  Description of Artificial Sequence: Synthetic oligonucleotide
gtttacgttcgtttattcgc

SEQ ID NO: 12045 - DNA, 22 bp, Artificial Sequence
  Description of Artificial Sequence: Synthetic oligonucleotide
taactctcgatacaaaccgcta

SEQ ID NO: 12046 - DNA, 22 bp, Artificial Sequence
  Description of Artificial Sequence: Synthetic oligonucleotide
atatttgataatttcgtcggat

SEQ ID NO: 12047 - DNA, 24 bp, Artificial Sequence
  Description of Artificial Sequence: Synthetic oligonucleotide
attgtgttatagaatttgaggtgt

SEQ ID NO: 12048 - DNA, 18 bp, Artificial Sequence
  Description of Artificial Sequence: Synthetic oligonucleotide
ggaggattcgtcgatttt

SEQ ID NO: 12049 - DNA, 21 bp, Artificial Sequence
  Description of Artificial Sequence: Synthetic oligonucleotide
caaaacctataactacgtccg

SEQ ID NO: 12050 - DNA, 23 bp, Artificial Sequence
  Description of Artificial Sequence: Synthetic oligonucleotide
aacctataactacgtccgaaaat

SEQ ID NO: 12051 - DNA, 20 bp, Artificial Sequence
  Description of Artificial Sequence: Synthetic oligonucleotide
actctcgatacaaaccgcta

SEQ ID NO: 12052 - DNA, 22 bp, Artificial Sequence
  Description of Artificial Sequence: Synthetic oligonucleotide
gcgtttgagtagcgtttttaat

SEQ ID NO: 12053 - DNA, 17 bp, Artificial Sequence
  Description of Artificial Sequence: Synthetic oligonucleotide
agcggcgttagttagta

SEQ ID NO: 12054 - DNA, 22 bp, Artificial Sequence
  Description of Artificial Sequence: Synthetic oligonucleotide
aacctataactacgtccgaaaa

SEQ ID NO: 12055 - DNA, 21 bp, Artificial Sequence
  Description of Artificial Sequence: Synthetic oligonucleotide
gtttattcgcgtttgagtagc

SEQ ID NO: 12056 - DNA, 22 bp, Artificial Sequence
  Description of Artificial Sequence: Synthetic oligonucleotide
ttatatttgataatttcgtcgg

SEQ ID NO: 12057 - DNA, 20 bp, Artificial Sequence
  Description of Artificial Sequence: Synthetic oligonucleotide
tttattcgcgtttgagtagc

SEQ ID NO: 12058 - DNA, 23 bp, Artificial Sequence
  Description of Artificial Sequence: Synthetic oligonucleotide
gttatatttgataatttcgtcgg

SEQ ID NO: 12059 - DNA, 20 bp, Artificial Sequence
  Description of Artificial Sequence: Synthetic oligonucleotide
tcgtttttgtttagattcgg

SEQ ID NO: 12060 - DNA, 23 bp, Artificial Sequence
  Description of Artificial Sequence: Synthetic oligonucleotide
tatatttgataatttcgtcggat

SEQ ID NO: 12061 - DNA, 21 bp, Artificial Sequence
  Description of Artificial Sequence: Synthetic oligonucleotide
cgtttttgtttagattcggag

SEQ ID NO: 12062 - DNA, 21 bp, Artificial Sequence
  Description of Artificial Sequence: Synthetic oligonucleotide
aactctcgatacaaaccgcta

SEQ ID NO: 12063 - DNA, 21 bp, Artificial Sequence
  Description of Artificial Sequence: Synthetic oligonucleotide
ctaactctcgatacaaaccgc

SEQ ID NO: 12064 - DNA, 21 bp, Artificial Sequence
  Description of Artificial Sequence: Synthetic oligonucleotide
acacgtctactaactaacgcc

SEQ ID NO: 12065 - DNA, 20 bp, Artificial Sequence
  Description of Artificial Sequence: Synthetic oligonucleotide
ggtttacgttcgtttattcg

SEQ ID NO: 12066 - DNA, 23 bp, Artificial Sequence
  Description of Artificial Sequence: Synthetic oligonucleotide
atcaaaacctataactacgtccg

SEQ ID NO: 12067 - DNA, 21 bp, Artificial Sequence
  Description of Artificial Sequence: Synthetic oligonucleotide
aacctataactacgtccgaaa

SEQ ID NO: 12068 - DNA, 20 bp, Artificial Sequence
  Description of Artificial Sequence: Synthetic oligonucleotide
cgatacaaaccgctaaacac

SEQ ID NO: 12069 - DNA, 21 bp, Artificial Sequence
  Description of Artificial Sequence: Synthetic oligonucleotide
ttcgtttttgtttagattcgg

SEQ ID NO: 12070 - DNA, 23 bp, Artificial Sequence
  Description of Artificial Sequence: Synthetic oligonucleotide
aaaacctataactacgtccgaaa

SEQ ID NO: 12071 - DNA, 20 bp, Artificial Sequence
  Description of Artificial Sequence: Synthetic oligonucleotide
cgtttattcgcgtttgagta

SEQ ID NO: 12072 - DNA, 23 bp, Artificial Sequence
  Description of Artificial Sequence: Synthetic oligonucleotide
tctaaaataactatacgcgatcc

SEQ ID NO: 12073 - DNA, 20 bp, Artificial Sequence
  Description of Artificial Sequence: Synthetic oligonucleotide
cggttttggttatagacgtt

SEQ ID NO: 12074 - DNA, 18 bp, Artificial Sequence
  Description of Artificial Sequence: Synthetic oligonucleotide
gttcgttagtcgattcgt

SEQ ID NO: 12075 - DNA, 17 bp, Artificial Sequence
  Description of Artificial Sequence: Synthetic oligonucleotide
atcgcggttaggaagaa

SEQ ID NO: 12076 - DNA, 20 bp, Artificial Sequence
  Description of Artificial Sequence: Synthetic oligonucleotide
cgacgataaaacctacgaat

SEQ ID NO: 12077 - DNA, 22 bp, Artificial Sequence
  Description of Artificial Sequence: Synthetic oligonucleotide
gttagttagtagacgtgttcgc

SEQ ID NO: 12078 - DNA, 23 bp, Artificial Sequence
  Description of Artificial Sequence: Synthetic oligonucleotide
gtcgtttttaaattttcggacgt

SEQ ID NO: 12079 - DNA, 17 bp, Artificial Sequence
  Description of Artificial Sequence: Synthetic oligonucleotide
agggaattggggttgag

SEQ ID NO: 12080 - DNA, 19 bp, Artificial Sequence
  Description of Artificial Sequence: Synthetic oligonucleotide
ttattcgcgtttgagtagc

SEQ ID NO: 12081 - DNA, 21 bp, Artificial Sequence
  Description of Artificial Sequence: Synthetic oligonucleotide
tatttgataatttcgtcggat

SEQ ID NO: 12082 - DNA, 20 bp, Artificial Sequence
  Description of Artificial Sequence: Synthetic oligonucleotide
cgcgaacacgtctactaact

SEQ ID NO: 12083 - DNA, 21 bp, Artificial Sequence
  Description of Artificial Sequence: Synthetic oligonucleotide
agcgtttttaattagcggcgt

SEQ ID NO: 12084 - DNA, 19 bp, Artificial Sequence
  Description of Artificial Sequence: Synthetic oligonucleotide
tttacgttcgtttattcgc

SEQ ID NO: 12085 - DNA, 19 bp, Artificial Sequence
  Description of Artificial Sequence: Synthetic oligonucleotide
aaccgctaaacacctaacg

SEQ ID NO: 12086 - DNA, 22 bp, Artificial Sequence
  Description of Artificial Sequence: Synthetic oligonucleotide
cgcgaacacgtctactaactaa

SEQ ID NO: 12087 - DNA, 21 bp, Artificial Sequence
  Description of Artificial Sequence: Synthetic oligonucleotide
attcggagtttaagtcgttgt

SEQ ID NO: 12088 - DNA, 20 bp, Artificial Sequence
  Description of Artificial Sequence: Synthetic oligonucleotide
tggtttacgttcgtttattc

SEQ ID NO: 12089 - DNA, 21 bp, Artificial Sequence
  Description of Artificial Sequence: Synthetic oligonucleotide
cctataactacgtccgaaaat

SEQ ID NO: 12090 - DNA, 20 bp, Artificial Sequence
  Description of Artificial Sequence: Synthetic oligonucleotide
atttcttcctaaccgcgata

SEQ ID NO: 12091 - DNA, 22 bp, Artificial Sequence
  Description of Artificial Sequence: Synthetic oligonucleotide
ttaggcgtattagttagttcgg

SEQ ID NO: 12092 - DNA, 24 bp, Artificial Sequence
  Description of Artificial Sequence: Synthetic oligonucleotide
gtttgaatgataaagtgtttttat

SEQ ID NO: 12093 - DNA, 22 bp, Artificial Sequence
  Description of Artificial Sequence: Synthetic oligonucleotide
ctcgatacaaaccgctaaacac

SEQ ID NO: 12094 - DNA, 21 bp, Artificial Sequence
  Description of Artificial Sequence: Synthetic oligonucleotide
tcgatacaaaccgctaaacac

SEQ ID NO: 12095 - DNA, 19 bp, Artificial Sequence
  Description of Artificial Sequence: Synthetic oligonucleotide
cttcctaaccgcgataaaa

SEQ ID NO: 12096 - DNA, 23 bp, Artificial Sequence
  Description of Artificial Sequence: Synthetic oligonucleotide
gaacacgtctactaactaacgcc

SEQ ID NO: 12097 - DNA, 19 bp, Artificial Sequence
  Description of Artificial Sequence: Synthetic oligonucleotide
ctctcgatacaaaccgcta

SEQ ID NO: 12098 - DNA, 24 bp, Artificial Sequence
  Description of Artificial Sequence: Synthetic oligonucleotide
tatcaaaacctataactacgtccg

SEQ ID NO: 12099 - DNA, 20 bp, Artificial Sequence
  Description of Artificial Sequence: Synthetic oligonucleotide
ttcggagtttaagtcgttgt

SEQ ID NO: 12100 - DNA, 23 bp, Artificial Sequence
  Description of Artificial Sequence: Synthetic oligonucleotide
ttttggtttacgttcgtttattc

SEQ ID NO: 12101 - DNA, 20 bp, Artificial Sequence
  Description of Artificial Sequence: Synthetic oligonucleotide
aaaccgctaaacacctaacg

SEQ ID NO: 12102 - DNA, 22 bp, Artificial Sequence
  Description of Artificial Sequence: Synthetic oligonucleotide
tcgtttattcgcgtttgagtag

SEQ ID NO: 12103 - DNA, 21 bp, Artificial Sequence
  Description of Artificial Sequence: Synthetic oligonucleotide
cgacaaaaacctaccgtctac

SEQ ID NO: 12104 - DNA, 20 bp, Artificial Sequence
  Description of Artificial Sequence: Synthetic oligonucleotide
tcggatcgcgtatagttatt

SEQ ID NO: 12105 - DNA, 17 bp, Artificial Sequence
  Description of Artificial Sequence: Synthetic oligonucleotide
atcgagtagtcgcgcgt

SEQ ID NO: 12106 - DNA, 16 bp, Artificial Sequence
  Description of Artificial Sequence: Synthetic oligonucleotide
ggcgggagtcgtaggg

SEQ ID NO: 12107 - DNA, 21 bp, Artificial Sequence
  Description of Artificial Sequence: Synthetic oligonucleotide
aatttcttcctaaccgcgata

SEQ ID NO: 12108 - DNA, 22 bp, Artificial Sequence
  Description of Artificial Sequence: Synthetic oligonucleotide
ctaaaataactatacgcgatcc

SEQ ID NO: 12109 - DNA, 21 bp, Artificial Sequence
  Description of Artificial Sequence: Synthetic oligonucleotide
tcgtttattcgcgtttgagta

SEQ ID NO: 12110 - DNA, 21 bp, Artificial Sequence
  Description of Artificial Sequence: Synthetic oligonucleotide
cggagtttaagtcgttgtttt

SEQ ID NO: 12111 - DNA, 19 bp, Artificial Sequence
  Description of Artificial Sequence: Synthetic oligonucleotide
ttcctaaccgcgataaaaa

SEQ ID NO: 12112 - DNA, 19 bp, Artificial Sequence
  Description of Artificial Sequence: Synthetic oligonucleotide
cgatccgaatttcttccta

SEQ ID NO: 12113 - DNA, 21 bp, Artificial Sequence
  Description of Artificial Sequence: Synthetic oligonucleotide
gtattagttagttcggcggtt

SEQ ID NO: 12114 - DNA, 21 bp, Artificial Sequence
  Description of Artificial Sequence: Synthetic oligonucleotide
cgaatctaaacaaaaacgaaa

SEQ ID NO: 12115 - DNA, 19 bp, Artificial Sequence
  Description of Artificial Sequence: Synthetic oligonucleotide
gtcgtaggggttgtagacg

SEQ ID NO: 12116 - DNA, 16 bp, Artificial Sequence
  Description of Artificial Sequence: Synthetic oligonucleotide
ggttttcgcgcgggga

SEQ ID NO: 12117 - DNA, 21 bp, Artificial Sequence
  Description of Artificial Sequence: Synthetic oligonucleotide
tgtcggggtatatttttttaa

SEQ ID NO: 12118 - DNA, 19 bp, Artificial Sequence
  Description of Artificial Sequence: Synthetic oligonucleotide
tcttcctaaccgcgataaa

SEQ ID NO: 12119 - DNA, 19 bp, Artificial Sequence
  Description of Artificial Sequence: Synthetic oligonucleotide
tttcttcctaaccgcgata

SEQ ID NO: 12120 - DNA, 24 bp, Artificial Sequence
  Description of Artificial Sequence: Synthetic oligonucleotide
atctaaaataactatacgcgatcc

SEQ ID NO: 12121 - DNA, 21 bp, Artificial Sequence
  Description of Artificial Sequence: Synthetic oligonucleotide
ggtttacgttcgtttattcgc

SEQ ID NO: 12122 - DNA, 20 bp, Artificial Sequence
  Description of Artificial Sequence: Synthetic oligonucleotide
cggatcgcgtatagttattt

SEQ ID NO: 12123 - DNA, 22 bp, Artificial Sequence
  Description of Artificial Sequence: Synthetic oligonucleotide
gattcggagtttaagtcgttgt

SEQ ID NO: 12124 - DNA, 22 bp, Artificial Sequence
  Description of Artificial Sequence: Synthetic oligonucleotide
ttcgtttattcgcgtttgagta

SEQ ID NO: 12125 - DNA, 20 bp, Artificial Sequence
  Description of Artificial Sequence: Synthetic oligonucleotide
agtcgtaggggttgtagacg

SEQ ID NO: 12126 - DNA, 19 bp, Artificial Sequence
  Description of Artificial Sequence: Synthetic oligonucleotide
aggtttttgtcggggtata

SEQ ID NO: 12127 - DNA, 21 bp, Artificial Sequence
  Description of Artificial Sequence: Synthetic oligonucleotide
tggtttacgttcgtttattcg

SEQ ID NO: 12128 - DNA, 21 bp, Artificial Sequence
  Description of Artificial Sequence: Synthetic oligonucleotide
gcgaacacgtctactaactaa

SEQ ID NO: 12129 - DNA, 19 bp, Artificial Sequence
  Description of Artificial Sequence: Synthetic oligonucleotide
gttcgtttattcgcgtttg

SEQ ID NO: 12130 - DNA, 22 bp, Artificial Sequence
  Description of Artificial Sequence: Synthetic oligonucleotide
tttcggttttcgttaatttagt

SEQ ID NO: 12131 - DNA, 22 bp, Artificial Sequence
  Description of Artificial Sequence: Synthetic oligonucleotide
tataaaacgccgataaacttct

SEQ ID NO: 12132 - DNA, 20 bp, Artificial Sequence
  Description of Artificial Sequence: Synthetic oligonucleotide
tgcgaagttaacgtgggcga

SEQ ID NO: 12133 - DNA, 19 bp, Artificial Sequence
  Description of Artificial Sequence: Synthetic oligonucleotide
gtatagttgagggtagatt

SEQ ID NO: 12134 - DNA, 22 bp, Artificial Sequence
  Description of Artificial Sequence: Synthetic oligonucleotide
atataaaacgccgataaacttc

SEQ ID NO: 12135 - DNA, 22 bp, Artificial Sequence
  Description of Artificial Sequence: Synthetic oligonucleotide
cggttttcgttaatttagtgtt

SEQ ID NO: 12136 - DNA, 22 bp, Artificial Sequence
  Description of Artificial Sequence: Synthetic oligonucleotide
tcggttttcgttaatttagtgt

SEQ ID NO: 12137 - DNA, 21 bp, Artificial Sequence
  Description of Artificial Sequence: Synthetic oligonucleotide
ataaaacgccgataaacttct

SEQ ID NO: 12138 - DNA, 21 bp, Artificial Sequence
  Description of Artificial Sequence: Synthetic oligonucleotide
ctcaaatataaaacgccgata

SEQ ID NO: 12139 - DNA, 21 bp, Artificial Sequence
  Description of Artificial Sequence: Synthetic oligonucleotide
taaaacgccgataaacttctt

SEQ ID NO: 12140 - DNA, 23 bp, Artificial Sequence
  Description of Artificial Sequence: Synthetic oligonucleotide
aatataaaacgccgataaacttc

SEQ ID NO: 12141 - DNA, 23 bp, Artificial Sequence
  Description of Artificial Sequence: Synthetic oligonucleotide
gtttcggttttcgttaatttagt

SEQ ID NO: 12142 - DNA, 21 bp, Artificial Sequence
  Description of Artificial Sequence: Synthetic oligonucleotide
acgacctcaaatataaaacgc

SEQ ID NO: 12143 - DNA, 20 bp, Artificial Sequence
  Description of Artificial Sequence: Synthetic oligonucleotide
cgacctcaaatataaaacgc

SEQ ID NO: 12144 - DNA, 21 bp, Artificial Sequence
  Description of Artificial Sequence: Synthetic oligonucleotide
ttcggttttcgttaatttagt

SEQ ID NO: 12145 - DNA, 20 bp, Artificial Sequence
  Description of Artificial Sequence: Synthetic oligonucleotide
aaaacgccgataaacttctt

SEQ ID NO: 12146 - DNA, 20 bp, Artificial Sequence
  Description of Artificial Sequence: Synthetic oligonucleotide
aaacgccgataaacttcttt

SEQ ID NO: 12147 - DNA, 21 bp, Artificial Sequence
  Description of Artificial Sequence: Synthetic oligonucleotide
cggttttcgttaatttagtgt

SEQ ID NO: 12148 - DNA, 19 bp, Artificial Sequence
  Description of Artificial Sequence: Synthetic oligonucleotide
cgtttcggttttcgttaat

SEQ ID NO: 12149 - DNA, 21 bp, Artificial Sequence
  Description of Artificial Sequence: Synthetic oligonucleotide
attaaaatacgtcccgatctc

SEQ ID NO: 12150 - DNA, 23 bp, Artificial Sequence
  Description of Artificial Sequence: Synthetic oligonucleotide
cgagatttgtttttagttgtacg

SEQ ID NO: 12151 - DNA, 20 bp, Artificial Sequence
  Description of Artificial Sequence: Synthetic oligonucleotide
ttcgtttacgttaatttcgt

SEQ ID NO: 12152 - DNA, 21 bp, Artificial Sequence
  Description of Artificial Sequence: Synthetic oligonucleotide
agtaaaaatagtattgggttg

SEQ ID NO: 12153 - DNA, 23 bp, Artificial Sequence
  Description of Artificial Sequence: Synthetic oligonucleotide
tcgattatacgaactcacaatta

SEQ ID NO: 12154 - DNA, 21 bp, Artificial Sequence
  Description of Artificial Sequence: Synthetic oligonucleotide
ttttatcgtaggtatttcggg

SEQ ID NO: 12155 - DNA, 26 bp, Artificial Sequence
  Description of Artificial Sequence: Synthetic oligonucleotide
ggcgtgtatttaaattttcgcgttat

SEQ ID NO: 12156 - DNA, 19 bp, Artificial Sequence
  Description of Artificial Sequence: Synthetic oligonucleotide
ttggatgggtataagtaga

SEQ ID NO: 12157 - DNA, 21 bp, Artificial Sequence
  Description of Artificial Sequence: Synthetic oligonucleotide
tttttatcgtaggtatttcgg

SEQ ID NO: 12158 - DNA, 20 bp, Artificial Sequence
  Description of Artificial Sequence: Synthetic oligonucleotide
tttatcgtaggtatttcggg

SEQ ID NO: 12159 - DNA, 20 bp, Artificial Sequence
  Description of Artificial Sequence: Synthetic oligonucleotide
ttaaaatacgtcccgatctc

SEQ ID NO: 12160 - DNA, 22 bp, Artificial Sequence
  Description of Artificial Sequence: Synthetic oligonucleotide
cgattatacgaactcacaatta

SEQ ID NO: 12161 - DNA, 19 bp, Artificial Sequence
  Description of Artificial Sequence: Synthetic oligonucleotide
tatcgtaggtatttcgggg

SEQ ID NO: 12162 - DNA, 24 bp, Artificial Sequence
  Description of Artificial Sequence: Synthetic oligonucleotide
acgagatttgtttttagttgtacg

SEQ ID NO: 12163 - DNA, 20 bp, Artificial Sequence
  Description of Artificial Sequence: Synthetic oligonucleotide
ttatcgtaggtatttcgggg

SEQ ID NO: 12164 - DNA, 22 bp, Artificial Sequence
  Description of Artificial Sequence: Synthetic oligonucleotide
ttatacgttcgtgttgattgtt

SEQ ID NO: 12165 - DNA, 21 bp, Artificial Sequence
  Description of Artificial Sequence: Synthetic oligonucleotide
aataaaataacgcctcgaaaa

SEQ ID NO: 12166 - DNA, 20 bp, Artificial Sequence
  Description of Artificial Sequence: Synthetic oligonucleotide
ggcgagtttttacgtttcgt

SEQ ID NO: 12167 - DNA, 26 bp, Artificial Sequence
  Description of Artificial Sequence: Synthetic oligonucleotide
aacgtgaaggtgattgattttaacga

SEQ ID NO: 12168 - DNA, 22 bp, Artificial Sequence
  Description of Artificial Sequence: Synthetic oligonucleotide
attatacgttcgtgttgattgt

SEQ ID NO: 12169 - DNA, 21 bp, Artificial Sequence
  Description of Artificial Sequence: Synthetic oligonucleotide
ataaaataacgcctcgaaaac

SEQ ID NO: 12170 - DNA, 20 bp, Artificial Sequence
  Description of Artificial Sequence: Synthetic oligonucleotide
ataaaataacgcctcgaaaa

SEQ ID NO: 12171 - DNA, 21 bp, Artificial Sequence
  Description of Artificial Sequence: Synthetic oligonucleotide
gttttcgaggcgttattttat

SEQ ID NO: 12172 - DNA, 21 bp, Artificial Sequence
  Description of Artificial Sequence: Synthetic oligonucleotide
gcgatcaaacacgtaactact

SEQ ID NO: 12173 - DNA, 23 bp, Artificial Sequence
  Description of Artificial Sequence: Synthetic oligonucleotide
atcgatttgaacgttatcgacgt

SEQ ID NO: 12174 - DNA, 19 bp, Artificial Sequence
  Description of Artificial Sequence: Synthetic oligonucleotide
gaaggttttaatggtgaag

SEQ ID NO: 12175 - DNA, 22 bp, Artificial Sequence
  Description of Artificial Sequence: Synthetic oligonucleotide
aataaaataacgcctcgaaaac

SEQ ID NO: 12176 - DNA, 21 bp, Artificial Sequence
  Description of Artificial Sequence: Synthetic oligonucleotide
gttagacgtgaatgataacgc

SEQ ID NO: 12177 - DNA, 21 bp, Artificial Sequence
  Description of Artificial Sequence: Synthetic oligonucleotide
tatctaaaacgcgcacaatac

SEQ ID NO: 12178 - DNA, 16 bp, Artificial Sequence
  Description of Artificial Sequence: Synthetic oligonucleotide
gtgtcgcgtaacgttg

SEQ ID NO: 12179 - DNA, 20 bp, Artificial Sequence
  Description of Artificial Sequence: Synthetic oligonucleotide
tttttacgttgtagaacgat

SEQ ID NO: 12180 - DNA, 22 bp, Artificial Sequence
  Description of Artificial Sequence: Synthetic oligonucleotide
ctatctaaaacgcgcacaatac

SEQ ID NO: 12181 - DNA, 22 bp, Artificial Sequence
  Description of Artificial Sequence: Synthetic oligonucleotide
ggcgacgtgtttatttatattt

SEQ ID NO: 12182 - DNA, 20 bp, Artificial Sequence
  Description of Artificial Sequence: Synthetic oligonucleotide
tactctccaaatacgcgaac

SEQ ID NO: 12183 - DNA, 21 bp, Artificial Sequence
  Description of Artificial Sequence: Synthetic oligonucleotide
tacgaacggggttatttacgt

SEQ ID NO: 12184 - DNA, 20 bp, Artificial Sequence
  Description of Artificial Sequence: Synthetic oligonucleotide
aggtttttgagtttaaggtg

SEQ ID NO: 12185 - DNA, 20 bp, Artificial Sequence
  Description of Artificial Sequence: Synthetic oligonucleotide
gttactctccaaatacgcga

SEQ ID NO: 12186 - DNA, 21 bp, Artificial Sequence
  Description of Artificial Sequence: Synthetic oligonucleotide
aaataaaataacgcctcgaaa

SEQ ID NO: 12187 - DNA, 21 bp, Artificial Sequence
  Description of Artificial Sequence: Synthetic oligonucleotide
ggttatttacgttttgcgttt

SEQ ID NO: 12188 - DNA, 21 bp, Artificial Sequence
  Description of Artificial Sequence: Synthetic oligonucleotide
gcgttatcattcacgtctaac

SEQ ID NO: 12189 - DNA, 21 bp, Artificial Sequence
  Description of Artificial Sequence: Synthetic oligonucleotide
gatttgggggtgtttgtgtat

SEQ ID NO: 12190 - DNA, 21 bp, Artificial Sequence
  Description of Artificial Sequence: Synthetic oligonucleotide
gtattgtgcgcgttttagata

SEQ ID NO: 12191 - DNA, 22 bp, Artificial Sequence
  Description of Artificial Sequence: Synthetic oligonucleotide
caaacaaataatcgtcgttacc

SEQ ID NO: 12192 - DNA, 18 bp, Artificial Sequence
  Description of Artificial Sequence: Synthetic oligonucleotide
tttggtgagagtgggtgt

SEQ ID NO: 12193 - DNA, 19 bp, Artificial Sequence
  Description of Artificial Sequence: Synthetic oligonucleotide
ttatttacgagatcgtgga

SEQ ID NO: 12194 - DNA, 23 bp, Artificial Sequence
  Description of Artificial Sequence: Synthetic oligonucleotide
tattatacgttcgtgttgattgt

SEQ ID NO: 12195 - DNA, 20 bp, Artificial Sequence
  Description of Artificial Sequence: Synthetic oligonucleotide
taaaataacgcctcgaaaac

SEQ ID NO: 12196 - DNA, 22 bp, Artificial Sequence
  Description of Artificial Sequence: Synthetic oligonucleotide
agtattgtgcgcgttttagata

SEQ ID NO: 12197 - DNA, 21 bp, Artificial Sequence
  Description of Artificial Sequence: Synthetic oligonucleotide
tattgtgcgcgttttagatag

SEQ ID NO: 12198 - DNA, 21 bp, Artificial Sequence
  Description of Artificial Sequence: Synthetic oligonucleotide
ttactctccaaatacgcgaac

SEQ ID NO: 12199 - DNA, 20 bp, Artificial Sequence
  Description of Artificial Sequence: Synthetic oligonucleotide
aacggggttatttacgtttt

SEQ ID NO: 12200 - DNA, 20 bp, Artificial Sequence
  Description of Artificial Sequence: Synthetic oligonucleotide
gaaatcgctatctaaaacgc

SEQ ID NO: 12201 - DNA, 20 bp, Artificial Sequence
  Description of Artificial Sequence: Synthetic oligonucleotide
acgtttcgttgggtatagtg

SEQ ID NO: 12202 - DNA, 19 bp, Artificial Sequence
  Description of Artificial Sequence: Synthetic oligonucleotide
gagtattgtgcgcgtttta

SEQ ID NO: 12203 - DNA, 22 bp, Artificial Sequence
  Description of Artificial Sequence: Synthetic oligonucleotide
atctcaaacaaataatcgtcgt

SEQ ID NO: 12204 - DNA, 17 bp, Artificial Sequence
  Description of Artificial Sequence: Synthetic oligonucleotide
tacgagatcgtggacgg

SEQ ID NO: 12205 - DNA, 25 bp, Artificial Sequence
  Description of Artificial Sequence: Synthetic oligonucleotide
tagtgattttggtgagagtgggtgt

SEQ ID NO: 12206 - DNA, 20 bp, Artificial Sequence
  Description of Artificial Sequence: Synthetic oligonucleotide
atctaaaacgcgcacaatac

SEQ ID NO: 12207 - DNA, 20 bp, Artificial Sequence
  Description of Artificial Sequence: Synthetic oligonucleotide
ccgaaatcgctatctaaaac

SEQ ID NO: 12208 - DNA, 19 bp, Artificial Sequence
  Description of Artificial Sequence: Synthetic oligonucleotide
actctccaaatacgcgaac

SEQ ID NO: 12209 - DNA, 21 bp, Artificial Sequence
  Description of Artificial Sequence: Synthetic oligonucleotide
gtgttcgtttaggatttcgat

SEQ ID NO: 12210 - DNA, 22 bp, Artificial Sequence
  Description of Artificial Sequence: Synthetic oligonucleotide
taaataaccccgttcgtaaaat

SEQ ID NO: 12211 - DNA, 18 bp, Artificial Sequence
  Description of Artificial Sequence: Synthetic oligonucleotide
gttttcgtatatcggcga

SEQ ID NO: 12212 - DNA, 18 bp, Artificial Sequence
  Description of Artificial Sequence: Synthetic oligonucleotide
gggttagaacggtatcgt

SEQ ID NO: 12213 - DNA, 21 bp, Artificial Sequence
  Description of Artificial Sequence: Synthetic oligonucleotide
gttcgtttaggatttcgattt

SEQ ID NO: 12214 - DNA, 20 bp, Artificial Sequence
  Description of Artificial Sequence: Synthetic oligonucleotide
gtaaataaccccgttcgtaa

SEQ ID NO: 12215 - DNA, 19 bp, Artificial Sequence
  Description of Artificial Sequence: Synthetic oligonucleotide
ggttagaacggtatcgtat

SEQ ID NO: 12216 - DNA, 19 bp, Artificial Sequence
  Description of Artificial Sequence: Synthetic oligonucleotide
cgagaatgggtttcgtatt

SEQ ID NO: 12217 - DNA, 22 bp, Artificial Sequence
  Description of Artificial Sequence: Synthetic oligonucleotide
tctaaaaacttaataccgtcgc

SEQ ID NO: 12218 - DNA, 18 bp, Artificial Sequence
  Description of Artificial Sequence: Synthetic oligonucleotide
tacgcgcgacgattacgg

SEQ ID NO: 12219 - DNA, 19 bp, Artificial Sequence
  Description of Artificial Sequence: Synthetic oligonucleotide
tttggattggacgttaagt

SEQ ID NO: 12220 - DNA, 19 bp, Artificial Sequence
  Description of Artificial Sequence: Synthetic oligonucleotide
atatcgcggagttgtaggt

SEQ ID NO: 12221 - DNA, 20 bp, Artificial Sequence
  Description of Artificial Sequence: Synthetic oligonucleotide
gaacggggttatttacgttt

SEQ ID NO: 12222 - DNA, 22 bp, Artificial Sequence
  Description of Artificial Sequence: Synthetic oligonucleotide
cgatcaaacacgtaactactaa

SEQ ID NO: 12223 - DNA, 20 bp, Artificial Sequence
  Description of Artificial Sequence: Synthetic oligonucleotide
ttttcgaggcgttattttat

SEQ ID NO: 12224 - DNA, 20 bp, Artificial Sequence
  Description of Artificial Sequence: Synthetic oligonucleotide
aaacgtaaataaccccgttc

SEQ ID NO: 12225 - DNA, 20 bp, Artificial Sequence
  Description of Artificial Sequence: Synthetic oligonucleotide
tgttcgtttaggatttcgat

SEQ ID NO: 12226 - DNA, 20 bp, Artificial Sequence
  Description of Artificial Sequence: Synthetic oligonucleotide
gagttgtaggtgtcgcgtaa

SEQ ID NO: 12227 - DNA, 21 bp, Artificial Sequence
  Description of Artificial Sequence: Synthetic oligonucleotide
tctcaaacaaataatcgtcgt

SEQ ID NO: 12228 - DNA, 19 bp, Artificial Sequence
  Description of Artificial Sequence: Synthetic oligonucleotide
taaaacgcgcacaatactc

SEQ ID NO: 12229 - DNA, 19 bp, Artificial Sequence
  Description of Artificial Sequence: Synthetic oligonucleotide
tctaaaacgcgcacaatac

SEQ ID NO: 12230 - DNA, 21 bp, Artificial Sequence
  Description of Artificial Sequence: Synthetic oligonucleotide
aaacaaataatcgtcgttacc

SEQ ID NO: 12231 - DNA, 20 bp, Artificial Sequence
  Description of Artificial Sequence: Synthetic oligonucleotide
attgtgcgcgttttagatag

SEQ ID NO: 12232 - DNA, 22 bp, Artificial Sequence
  Description of Artificial Sequence: Synthetic oligonucleotide
gtaaataaccccgttcgtaaaa

SEQ ID NO: 12233 - DNA, 19 bp, Artificial Sequence
  Description of Artificial Sequence: Synthetic oligonucleotide
agttgtaggtgtcgcgtaa

SEQ ID NO: 12234 - DNA, 19 bp, Artificial Sequence
  Description of Artificial Sequence: Synthetic oligonucleotide
taaaataacgcctcgaaaa

SEQ ID NO: 12235 - DNA, 16 bp, Artificial Sequence
  Description of Artificial Sequence: Synthetic oligonucleotide
tttcggcgagagcggg

SEQ ID NO: 12236 - DNA, 20 bp, Artificial Sequence
  Description of Artificial Sequence: Synthetic oligonucleotide
gttttatttacgagatcgtg

SEQ ID NO: 12237 - DNA, 20 bp, Artificial Sequence
  Description of Artificial Sequence: Synthetic oligonucleotide
aataaccccgttcgtaaaat

SEQ ID NO: 12238 - DNA, 23 bp, Artificial Sequence
  Description of Artificial Sequence: Synthetic oligonucleotide
cgttatcattcacgtctaacact

SEQ ID NO: 12239 - DNA, 21 bp, Artificial Sequence
  Description of Artificial Sequence: Synthetic oligonucleotide
tttcgaggcgttattttattt

SEQ ID NO: 12240 - DNA, 23 bp, Artificial Sequence
  Description of Artificial Sequence: Synthetic oligonucleotide
gcgatcaaacacgtaactactaa

SEQ ID NO: 12241 - DNA, 21 bp, Artificial Sequence
  Description of Artificial Sequence: Synthetic oligonucleotide
accaaataaaataacgcctcg

SEQ ID NO: 12242 - DNA, 20 bp, Artificial Sequence
  Description of Artificial Sequence: Synthetic oligonucleotide
ctaaaacgcgcacaatactc

SEQ ID NO: 12243 - DNA, 19 bp, Artificial Sequence
  Description of Artificial Sequence: Synthetic oligonucleotide
agtattgtgcgcgttttag

SEQ ID NO: 12244 - DNA, 19 bp, Artificial Sequence
  Description of Artificial Sequence: Synthetic oligonucleotide
gtcgtttatcggtttcgtt

SEQ ID NO: 12245 - DNA, 21 bp, Artificial Sequence
  Description of Artificial Sequence: Synthetic oligonucleotide
cgacactacaactatccgttc

SEQ ID NO: 12246 - DNA, 18 bp, Artificial Sequence
  Description of Artificial Sequence: Synthetic oligonucleotide
ggcgttgagcgaggtcgt

SEQ ID NO: 12247 - DNA, 17 bp, Artificial Sequence
  Description of Artificial Sequence: Synthetic oligonucleotide
tgcgggttattgatcgg

SEQ ID NO: 12248 - DNA, 19 bp, Artificial Sequence
  Description of Artificial Sequence: Synthetic oligonucleotide
caaataaaataacgcctcg

SEQ ID NO: 12249 - DNA, 18 bp, Artificial Sequence
  Description of Artificial Sequence: Synthetic oligonucleotide
aataacgcctcgaaaacc

SEQ ID NO: 12250 - DNA, 22 bp, Artificial Sequence
  Description of Artificial Sequence: Synthetic oligonucleotide
acggtaagtttattttgttcgt

SEQ ID NO: 12251 - DNA, 22 bp, Artificial Sequence
  Description of Artificial Sequence: Synthetic oligonucleotide
acgacaacgacatatcccaata

SEQ ID NO: 12252 - DNA, 16 bp, Artificial Sequence
  Description of Artificial Sequence: Synthetic oligonucleotide
ttcgttcggtgagcgg

SEQ ID NO: 12253 - DNA, 17 bp, Artificial Sequence
  Description of Artificial Sequence: Synthetic oligonucleotide
ggggtattacgggtgaa

SEQ ID NO: 12254 - DNA, 22 bp, Artificial Sequence
  Description of Artificial Sequence: Synthetic oligonucleotide
cggtaagtttattttgttcgta

SEQ ID NO: 12255 - DNA, 21 bp, Artificial Sequence
  Description of Artificial Sequence: Synthetic oligonucleotide
taaacgacaacgacatatccc

SEQ ID NO: 12256 - DNA, 22 bp, Artificial Sequence
  Description of Artificial Sequence: Synthetic oligonucleotide
tacggtaagtttattttgttcg

SEQ ID NO: 12257 - DNA, 24 bp, Artificial Sequence
  Description of Artificial Sequence: Synthetic oligonucleotide
tttattagcgtatatgatttcgac

SEQ ID NO: 12258 - DNA, 22 bp, Artificial Sequence
  Description of Artificial Sequence: Synthetic oligonucleotide
ctaaaaacttaataccgtcgcc

SEQ ID NO: 12259 - DNA, 20 bp, Artificial Sequence
  Description of Artificial Sequence: Synthetic oligonucleotide
tcgtttaggatttcgatttg

SEQ ID NO: 12260 - DNA, 21 bp, Artificial Sequence
  Description of Artificial Sequence: Synthetic oligonucleotide
gtaaataaccccgttcgtaaa

SEQ ID NO: 12261 - DNA, 20 bp, Artificial Sequence
  Description of Artificial Sequence: Synthetic oligonucleotide
gttagaacggtatcgtattt

SEQ ID NO: 12262 - DNA, 19 bp, Artificial Sequence
  Description of Artificial Sequence: Synthetic oligonucleotide
aaaataacgcctcgaaaac

SEQ ID NO: 12263 - DNA, 20 bp, Artificial Sequence
  Description of Artificial Sequence: Synthetic oligonucleotide
ccaaataaaataacgcctcg

SEQ ID NO: 12264 - DNA, 21 bp, Artificial Sequence
  Description of Artificial Sequence: Synthetic oligonucleotide
taaaaacttaataccgtcgcc

SEQ ID NO: 12265 - DNA, 22 bp, Artificial Sequence
  Description of Artificial Sequence: Synthetic oligonucleotide
caaataaaataacgcctcgaaa

SEQ ID NO: 12266 - DNA, 22 bp, Artificial Sequence
  Description of Artificial Sequence: Synthetic oligonucleotide
cgagaatgggtttcgtatttat

SEQ ID NO: 12267 - DNA, 20 bp, Artificial Sequence
  Description of Artificial Sequence: Synthetic oligonucleotide
taaataaccccgttcgtaaa

SEQ ID NO: 12268 - DNA, 22 bp, Artificial Sequence
  Description of Artificial Sequence: Synthetic oligonucleotide
cgatctcaaacaaataatcgtc

SEQ ID NO: 12269 - DNA, 21 bp, Artificial Sequence
  Description of Artificial Sequence: Synthetic oligonucleotide
cgacaacgacatatcccaata

SEQ ID NO: 12270 - DNA, 21 bp, Artificial Sequence
  Description of Artificial Sequence: Synthetic oligonucleotide
tatacgttcgtgttgattgtt

SEQ ID NO: 12271 - DNA, 21 bp, Artificial Sequence
  Description of Artificial Sequence: Synthetic oligonucleotide
ttatacgttcgtgttgattgt

SEQ ID NO: 12272 - DNA, 23 bp, Artificial Sequence
  Description of Artificial Sequence: Synthetic oligonucleotide
acggtaagtttattttgttcgta

SEQ ID NO: 12273 - DNA, 21 bp, Artificial Sequence
  Description of Artificial Sequence: Synthetic oligonucleotide
aaataaccccgttcgtaaaat

SEQ ID NO: 12274 - DNA, 19 bp, Artificial Sequence
  Description of Artificial Sequence: Synthetic oligonucleotide
ttgtgcgcgttttagatag

SEQ ID NO: 12275 - DNA, 18 bp, Artificial Sequence
  Description of Artificial Sequence: Synthetic oligonucleotide
ttcggcgagagcgggcgt

SEQ ID NO: 12276 - DNA, 23 bp, Artificial Sequence
  Description of Artificial Sequence: Synthetic oligonucleotide
ttattatacgttcgtgttgattg

SEQ ID NO: 12277 - DNA, 22 bp, Artificial Sequence
  Description of Artificial Sequence: Synthetic oligonucleotide
tgttagacgtgaatgataacgc

SEQ ID NO: 12278 - DNA, 20 bp, Artificial Sequence
  Description of Artificial Sequence: Synthetic oligonucleotide
acggggttatttacgttttg

SEQ ID NO: 12279 - DNA, 19 bp, Artificial Sequence
  Description of Artificial Sequence: Synthetic oligonucleotide
aacgacaacgacatatccc

SEQ ID NO: 12280 - DNA, 20 bp, Artificial Sequence
  Description of Artificial Sequence: Synthetic oligonucleotide
tatacggtggtgattgatcg

SEQ ID NO: 12281 - DNA, 22 bp, Artificial Sequence
  Description of Artificial Sequence: Synthetic oligonucleotide
acgaattatcgttctcgtctaa

SEQ ID NO: 12282 - DNA, 20 bp, Artificial Sequence
  Description of Artificial Sequence: Synthetic oligonucleotide
gatcgcgagatataagacga

SEQ ID NO: 12283 - DNA, 17 bp, Artificial Sequence
  Description of Artificial Sequence: Synthetic oligonucleotide
ggcgcgggacgggggtt

SEQ ID NO: 12284 - DNA, 19 bp, Artificial Sequence
  Description of Artificial Sequence: Synthetic oligonucleotide
cggggttatttacgttttg

SEQ ID NO: 12285 - DNA, 20 bp, Artificial Sequence
  Description of Artificial Sequence: Synthetic oligonucleotide
gagtattgtgcgcgttttag

SEQ ID NO: 12286 - DNA, 21 bp, Artificial Sequence
  Description of Artificial Sequence: Synthetic oligonucleotide
tcgatctcaaacaaataatcg

SEQ ID NO: 12287 - DNA, 19 bp, Artificial Sequence
  Description of Artificial Sequence: Synthetic oligonucleotide
gccgaaatcgctatctaaa

SEQ ID NO: 12288 - DNA, 23 bp, Artificial Sequence
  Description of Artificial Sequence: Synthetic oligonucleotide
ttattagcgtatatgatttcgac

SEQ ID NO: 12289 - DNA, 20 bp, Artificial Sequence
  Description of Artificial Sequence: Synthetic oligonucleotide
ttagacgtgaatgataacgc

SEQ ID NO: 12290 - DNA, 22 bp, Artificial Sequence
  Description of Artificial Sequence: Synthetic oligonucleotide
gttcgtttaggatttcgatttg

SEQ ID NO: 12291 - DNA, 21 bp, Artificial Sequence
  Description of Artificial Sequence: Synthetic oligonucleotide
acacgataataactaaccgcc

SEQ ID NO: 12292 - DNA, 22 bp, Artificial Sequence
  Description of Artificial Sequence: Synthetic oligonucleotide
cgttttcgtttagaattttgat

SEQ ID NO: 12293 - DNA, 23 bp, Artificial Sequence
  Description of Artificial Sequence: Synthetic oligonucleotide
tacgatggttacgttgtattcgt

SEQ ID NO: 12294 - DNA, 17 bp, Artificial Sequence
  Description of Artificial Sequence: Synthetic oligonucleotide
tgaggggaggagagttt

SEQ ID NO: 12295 - DNA, 20 bp, Artificial Sequence
  Description of Artificial Sequence: Synthetic oligonucleotide
cacgataataactaaccgcc

SEQ ID NO: 12296 - DNA, 20 bp, Artificial Sequence
  Description of Artificial Sequence: Synthetic oligonucleotide
gaacgtctcacctacgaaat

SEQ ID NO: 12297 - DNA, 22 bp, Artificial Sequence
  Description of Artificial Sequence: Synthetic oligonucleotide
tattagttttattacgggcgtt

SEQ ID NO: 12298 - DNA, 16 bp, Artificial Sequence
  Description of Artificial Sequence: Synthetic oligonucleotide
tgcggatttcgtcgtt

SEQ ID NO: 12299 - DNA, 21 bp, Artificial Sequence
  Description of Artificial Sequence: Synthetic oligonucleotide
gtttttttagaaagggtgtag

SEQ ID NO: 12300 - DNA, 22 bp, Artificial Sequence
  Description of Artificial Sequence: Synthetic oligonucleotide
gtcgttttcgtttagaattttg

SEQ ID NO: 12301 - DNA, 17 bp, Artificial Sequence
  Description of Artificial Sequence: Synthetic oligonucleotide
atcgcgaacgatttggt

SEQ ID NO: 12302 - DNA, 21 bp, Artificial Sequence
  Description of Artificial Sequence: Synthetic oligonucleotide
ataaaaataaccgaccacgac

SEQ ID NO: 12303 - DNA, 21 bp, Artificial Sequence
  Description of Artificial Sequence: Synthetic oligonucleotide
tagagttacgatgagcggtag

SEQ ID NO: 12304 - DNA, 17 bp, Artificial Sequence
  Description of Artificial Sequence: Synthetic oligonucleotide
attcgtttatcgagcgg

SEQ ID NO: 12305 - DNA, 16 bp, Artificial Sequence
  Description of Artificial Sequence: Synthetic oligonucleotide
tgcggatagggtaggt

SEQ ID NO: 12306 - DNA, 22 bp, Artificial Sequence
  Description of Artificial Sequence: Synthetic oligonucleotide
attattagttttattacgggcg

SEQ ID NO: 12307 - DNA, 21 bp, Artificial Sequence
  Description of Artificial Sequence: Synthetic oligonucleotide
tcgttttcgtttagaattttg

SEQ ID NO: 12308 - DNA, 22 bp, Artificial Sequence
  Description of Artificial Sequence: Synthetic oligonucleotide
atcgacgacgtatctatctaca

SEQ ID NO: 12309 - DNA, 23 bp, Artificial Sequence
  Description of Artificial Sequence: Synthetic oligonucleotide
gcgttttcgagtttttagtaagt

SEQ ID NO: 12310 - DNA, 21 bp, Artificial Sequence
  Description of Artificial Sequence: Synthetic oligonucleotide
ggcgtagatggtttcgttcgt

SEQ ID NO: 12311 - DNA, 24 bp, Artificial Sequence
  Description of Artificial Sequence: Synthetic oligonucleotide
ttgaatttaaaagttttggtttgt

SEQ ID NO: 12312 - DNA, 22 bp, Artificial Sequence
  Description of Artificial Sequence: Synthetic oligonucleotide
cgttttcgagtttttagtaagt

SEQ ID NO: 12313 - DNA, 22 bp, Artificial Sequence
  Description of Artificial Sequence: Synthetic oligonucleotide
ccgtacaaatcaacgtaaaaat

SEQ ID NO: 12314 - DNA, 22 bp, Artificial Sequence
  Description of Artificial Sequence: Synthetic oligonucleotide
attattgtatttagcggagcgt

SEQ ID NO: 12315 - DNA, 17 bp, Artificial Sequence
  Description of Artificial Sequence: Synthetic oligonucleotide
ggcgtttcgaagatcgg

SEQ ID NO: 12316 - DNA, 20 bp, Artificial Sequence
  Description of Artificial Sequence: Synthetic oligonucleotide
gggtagttttattaagtagg

SEQ ID NO: 12317 - DNA, 22 bp, Artificial Sequence
  Description of Artificial Sequence: Synthetic oligonucleotide
cgaaataaacatctcgaaaaac

SEQ ID NO: 12318 - DNA, 20 bp, Artificial Sequence
  Description of Artificial Sequence: Synthetic oligonucleotide
ttaaagaggtcgtgatcgtc

SEQ ID NO: 12319 - DNA, 17 bp, Artificial Sequence
  Description of Artificial Sequence: Synthetic oligonucleotide
tttattttcgtcggcgt

SEQ ID NO: 12320 - DNA, 16 bp, Artificial Sequence
  Description of Artificial Sequence: Synthetic oligonucleotide
agcgggtgttcggagt

SEQ ID NO: 12321 - DNA, 22 bp, Artificial Sequence
  Description of Artificial Sequence: Synthetic oligonucleotide
gaaataaacatctcgaaaaacg

SEQ ID NO: 12322 - DNA, 21 bp, Artificial Sequence
  Description of Artificial Sequence: Synthetic oligonucleotide
accgtacaaatcaacgtaaaa

SEQ ID NO: 12323 - DNA, 21 bp, Artificial Sequence
  Description of Artificial Sequence: Synthetic oligonucleotide
acaacgacgaccacctattta

SEQ ID NO: 12324 - DNA, 20 bp, Artificial Sequence
  Description of Artificial Sequence: Synthetic oligonucleotide
caacgacgaccacctattta

SEQ ID NO: 12325 - DNA, 20 bp, Artificial Sequence
  Description of Artificial Sequence: Synthetic oligonucleotide
acgataataactaaccgccc

SEQ ID NO: 12326 - DNA, 20 bp, Artificial Sequence
  Description of Artificial Sequence: Synthetic oligonucleotide
tattgtatttagcggagcgt

SEQ ID NO: 12327 - DNA, 20 bp, Artificial Sequence
  Description of Artificial Sequence: Synthetic oligonucleotide
taaaaataaccgaccacgac

SEQ ID NO: 12328 - DNA, 22 bp, Artificial Sequence
  Description of Artificial Sequence: Synthetic oligonucleotide
ataaacatctcgaaaaacgcta

SEQ ID NO: 12329 - DNA, 16 bp, Artificial Sequence
  Description of Artificial Sequence: Synthetic oligonucleotide
gaagcgggtgttcgga

SEQ ID NO: 12330 - DNA, 19 bp, Artificial Sequence
  Description of Artificial Sequence: Synthetic oligonucleotide
cgataataactaaccgccc

SEQ ID NO: 12331 - DNA, 19 bp, Artificial Sequence
  Description of Artificial Sequence: Synthetic oligonucleotide
gataataactaaccgcccg

SEQ ID NO: 12332 - DNA, 22 bp, Artificial Sequence
  Description of Artificial Sequence: Synthetic oligonucleotide
tctaataaacactatacgcgcc

SEQ ID NO: 12333 - DNA, 20 bp, Artificial Sequence
  Description of Artificial Sequence: Synthetic oligonucleotide
ttaaataggtggtcgtcgtt

SEQ ID NO: 12334 - DNA, 17 bp, Artificial Sequence
  Description of Artificial Sequence: Synthetic oligonucleotide
ttcgtcgaagtcgttgt

SEQ ID NO: 12335 - DNA, 26 bp, Artificial Sequence
  Description of Artificial Sequence: Synthetic oligonucleotide
tacgatttcgtaggtgagacgttcgt

SEQ ID NO: 12336 - DNA, 21 bp, Artificial Sequence
  Description of Artificial Sequence: Synthetic oligonucleotide
ctaataaacactatacgcgcc

SEQ ID NO: 12337 - DNA, 22 bp, Artificial Sequence
  Description of Artificial Sequence: Synthetic oligonucleotide
tcgacgacgtatctatctacac

SEQ ID NO: 12338 - DNA, 20 bp, Artificial Sequence
  Description of Artificial Sequence: Synthetic oligonucleotide
ggcgttttcgagtttttagt

SEQ ID NO: 12339 - DNA, 22 bp, Artificial Sequence
  Description of Artificial Sequence: Synthetic oligonucleotide
cgacgacgtatctatctacacc

SEQ ID NO: 12340 - DNA, 22 bp, Artificial Sequence
  Description of Artificial Sequence: Synthetic oligonucleotide
ttagagttacgatgagcggtag

SEQ ID NO: 12341 - DNA, 21 bp, Artificial Sequence
  Description of Artificial Sequence: Synthetic oligonucleotide
ttattgtatttagcggagcgt

SEQ ID NO: 12342 - DNA, 21 bp, Artificial Sequence
  Description of Artificial Sequence: Synthetic oligonucleotide
attagttttattacgggcgtt

SEQ ID NO: 12343 - DNA, 22 bp, Artificial Sequence
  Description of Artificial Sequence: Synthetic oligonucleotide
taaacatctcgaaaaacgctac

SEQ ID NO: 12344 - DNA, 16 bp, Artificial Sequence
  Description of Artificial Sequence: Synthetic oligonucleotide
ggaagcgggtgttcgg

SEQ ID NO: 12345 - DNA, 24 bp, Artificial Sequence
  Description of Artificial Sequence: Synthetic oligonucleotide
cgttttcgagtttttagtaagtat

SEQ ID NO: 12346 - DNA, 19 bp, Artificial Sequence
  Description of Artificial Sequence: Synthetic oligonucleotide
gacaacgacgaccacctat

SEQ ID NO: 12347 - DNA, 22 bp, Artificial Sequence
  Description of Artificial Sequence: Synthetic oligonucleotide
gattattgtatttagcggagcg

SEQ ID NO: 12348 - DNA, 20 bp, Artificial Sequence
  Description of Artificial Sequence: Synthetic oligonucleotide
agagttacgatgagcggtag

SEQ ID NO: 12349 - DNA, 20 bp, Artificial Sequence
  Description of Artificial Sequence: Synthetic oligonucleotide
cgaatacaacgtaaccatcg

SEQ ID NO: 12350 - DNA, 17 bp, Artificial Sequence
  Description of Artificial Sequence: Synthetic oligonucleotide
gagttttcgtttcgcgt

SEQ ID NO: 12351 - DNA, 20 bp, Artificial Sequence
  Description of Artificial Sequence: Synthetic oligonucleotide
atttggtggagttgagggga

SEQ ID NO: 12352 - DNA, 19 bp, Artificial Sequence
  Description of Artificial Sequence: Synthetic oligonucleotide
attgtatttagcggagcgt

SEQ ID NO: 12353 - DNA, 22 bp, Artificial Sequence
  Description of Artificial Sequence: Synthetic oligonucleotide
taccctaaacgataacgaacct

SEQ ID NO: 12354 - DNA, 19 bp, Artificial Sequence
  Description of Artificial Sequence: Synthetic oligonucleotide
aaaaataaccgaccacgac

SEQ ID NO: 12355 - DNA, 22 bp, Artificial Sequence
  Description of Artificial Sequence: Synthetic oligonucleotide
taccacgaataaataacgaaca

SEQ ID NO: 12356 - DNA, 18 bp, Artificial Sequence
  Description of Artificial Sequence: Synthetic oligonucleotide
tttgtatttgacggcgat

SEQ ID NO: 12357 - DNA, 18 bp, Artificial Sequence
  Description of Artificial Sequence: Synthetic oligonucleotide
tacgatgagcggtagcga

SEQ ID NO: 12358 - DNA, 17 bp, Artificial Sequence
  Description of Artificial Sequence: Synthetic oligonucleotide
ggatgatggagatagtg

SEQ ID NO: 12359 - DNA, 23 bp, Artificial Sequence
  Description of Artificial Sequence: Synthetic oligonucleotide
cgtacaaatcaacgtaaaaataa

SEQ ID NO: 12360 - DNA, 21 bp, Artificial Sequence
  Description of Artificial Sequence: Synthetic oligonucleotide
attattgtatttagcggagcg

SEQ ID NO: 12361 - DNA, 21 bp, Artificial Sequence
  Description of Artificial Sequence: Synthetic oligonucleotide
gaacgtctcacctacgaaatc

SEQ ID NO: 12362 - DNA, 21 bp, Artificial Sequence
  Description of Artificial Sequence: Synthetic oligonucleotide
gtcgtggtcggttatttttat

SEQ ID NO: 12363 - DNA, 20 bp, Artificial Sequence
  Description of Artificial Sequence: Synthetic oligonucleotide
aaaaactctaaaccgcgaac

SEQ ID NO: 12364 - DNA, 22 bp, Artificial Sequence
  Description of Artificial Sequence: Synthetic oligonucleotide
atttttacgttgatttgtacgg

SEQ ID NO: 12365 - DNA, 21 bp, Artificial Sequence
  Description of Artificial Sequence: Synthetic oligonucleotide
aacgtggaggttcgttatcgt

SEQ ID NO: 12366 - DNA, 17 bp, Artificial Sequence
  Description of Artificial Sequence: Synthetic oligonucleotide
gtacgagcgtatggtga

SEQ ID NO: 12367 - DNA, 21 bp, Artificial Sequence
  Description of Artificial Sequence: Synthetic oligonucleotide
aacatctcgaaaaacgctact

SEQ ID NO: 12368 - DNA, 17 bp, Artificial Sequence
  Description of Artificial Sequence: Synthetic oligonucleotide
gagtaggtaggtgcgga

SEQ ID NO: 12369 - DNA, 19 bp, Artificial Sequence
  Description of Artificial Sequence: Synthetic oligonucleotide
aaaactctaaaccgcgaac

SEQ ID NO: 12370 - DNA, 21 bp, Artificial Sequence
  Description of Artificial Sequence: Synthetic oligonucleotide
taaacgataacgaacctccac

SEQ ID NO: 12371 - DNA, 22 bp, Artificial Sequence
  Description of Artificial Sequence: Synthetic oligonucleotide
cgatgattattgtatttagcgg

SEQ ID NO: 12372 - DNA, 18 bp, Artificial Sequence
  Description of Artificial Sequence: Synthetic oligonucleotide
cgatcaaactcatcgacc

SEQ ID NO: 12373 - DNA, 22 bp, Artificial Sequence
  Description of Artificial Sequence: Synthetic oligonucleotide
gtttcggttagtgattcgtatt

SEQ ID NO: 12374 - DNA, 16 bp, Artificial Sequence
  Description of Artificial Sequence: Synthetic oligonucleotide
gacggcgtattgtcgt

SEQ ID NO: 12375 - DNA, 21 bp, Artificial Sequence
  Description of Artificial Sequence: Synthetic oligonucleotide
ggcgtacggagacgaaatcga

SEQ ID NO: 12376 - DNA, 22 bp, Artificial Sequence
  Description of Artificial Sequence: Synthetic oligonucleotide
ctaaacgataacgaacctccac

SEQ ID NO: 12377 - DNA, 22 bp, Artificial Sequence
  Description of Artificial Sequence: Synthetic oligonucleotide
ataataaaaataaccgaccacg

SEQ ID NO: 12378 - DNA, 18 bp, Artificial Sequence
  Description of Artificial Sequence: Synthetic oligonucleotide
atgagcggtagcgatatg

SEQ ID NO: 12379 - DNA, 20 bp, Artificial Sequence
  Description of Artificial Sequence: Synthetic oligonucleotide
aacgtctcacctacgaaatc

SEQ ID NO: 12380 - DNA, 21 bp, Artificial Sequence
  Description of Artificial Sequence: Synthetic oligonucleotide
caccgtacaaatcaacgtaaa

SEQ ID NO: 12381 - DNA, 22 bp, Artificial Sequence
  Description of Artificial Sequence: Synthetic oligonucleotide
aataaaaataaccgaccacgac

SEQ ID NO: 12382 - DNA, 21 bp, Artificial Sequence
  Description of Artificial Sequence: Synthetic oligonucleotide
aaataaacatctcgaaaaacg

SEQ ID NO: 12383 - DNA, 20 bp, Artificial Sequence
  Description of Artificial Sequence: Synthetic oligonucleotide
cgaaccaaatcgaaataaac

SEQ ID NO: 12384 - DNA, 18 bp, Artificial Sequence
  Description of Artificial Sequence: Synthetic oligonucleotide
gagtagcgtttttcgaga

SEQ ID NO: 12385 - DNA, 22 bp, Artificial Sequence
  Description of Artificial Sequence: Synthetic oligonucleotide
acgctcgtactaactaccctaa

SEQ ID NO: 12386 - DNA, 21 bp, Artificial Sequence
  Description of Artificial Sequence: Synthetic oligonucleotide
attaagtaggatggcgtttcg

SEQ ID NO: 12387 - DNA, 16 bp, Artificial Sequence
  Description of Artificial Sequence: Synthetic oligonucleotide
tacggtggcggaacgt

SEQ ID NO: 12388 - DNA, 26 bp, Artificial Sequence
  Description of Artificial Sequence: Synthetic oligonucleotide
gtcgttggagttaattatttttacgt

SEQ ID NO: 12389 - DNA, 19 bp, Artificial Sequence
  Description of Artificial Sequence: Synthetic oligonucleotide
aataatcgtactccccacg

SEQ ID NO: 12390 - DNA, 21 bp, Artificial Sequence
  Description of Artificial Sequence: Synthetic oligonucleotide
ggcgcgtatagtgtttattag

SEQ ID NO: 12391 - DNA, 16 bp, Artificial Sequence
  Description of Artificial Sequence: Synthetic oligonucleotide
agtttcgcggtgtcgt

SEQ ID NO: 12392 - DNA, 20 bp, Artificial Sequence
  Description of Artificial Sequence: Synthetic oligonucleotide
gatagtttaggttagcgttg

SEQ ID NO: 12393 - DNA, 20 bp, Artificial Sequence
  Description of Artificial Sequence: Synthetic oligonucleotide
acaacgccacgataaaaata

SEQ ID NO: 12394 - DNA, 22 bp, Artificial Sequence
  Description of Artificial Sequence: Synthetic oligonucleotide
gcgcgtatagtgtttattagat

SEQ ID NO: 12395 - DNA, 20 bp, Artificial Sequence
  Description of Artificial Sequence: Synthetic oligonucleotide
tggcgcgttgttatttacgt

SEQ ID NO: 12396 - DNA, 26 bp, Artificial Sequence
  Description of Artificial Sequence: Synthetic oligonucleotide
gtcgttttgtagcgtggggagtacga

SEQ ID NO: 12397 - DNA, 21 bp, Artificial Sequence
  Description of Artificial Sequence: Synthetic oligonucleotide
ttattagttttattacgggcg

SEQ ID NO: 12398 - DNA, 22 bp, Artificial Sequence
  Description of Artificial Sequence: Synthetic oligonucleotide
gacgacgtatctatctacacct

SEQ ID NO: 12399 - DNA, 19 bp, Artificial Sequence
  Description of Artificial Sequence: Synthetic oligonucleotide
agcgatatgttttagtggt

SEQ ID NO: 12400 - DNA, 22 bp, Artificial Sequence
  Description of Artificial Sequence: Synthetic oligonucleotide
ataataactaaccgcccgctaa

SEQ ID NO: 12401 - DNA, 21 bp, Artificial Sequence
  Description of Artificial Sequence: Synthetic oligonucleotide
taaataggtggtcgtcgttgt

SEQ ID NO: 12402 - DNA, 21 bp, Artificial Sequence
  Description of Artificial Sequence: Synthetic oligonucleotide
aataaacatctcgaaaaacgc

SEQ ID NO: 12403 - DNA, 19 bp, Artificial Sequence
  Description of Artificial Sequence: Synthetic oligonucleotide
aacgataacgaacctccac

SEQ ID NO: 12404 - DNA, 20 bp, Artificial Sequence
  Description of Artificial Sequence: Synthetic oligonucleotide
tcgtggtcggttatttttat

SEQ ID NO: 12405 - DNA, 19 bp, Artificial Sequence
  Description of Artificial Sequence: Synthetic oligonucleotide
taagtaggatggcgtttcg

SEQ ID NO: 12406 - DNA, 21 bp, Artificial Sequence
  Description of Artificial Sequence: Synthetic oligonucleotide
aaacatctcgaaaaacgctac

SEQ ID NO: 12407 - DNA, 16 bp, Artificial Sequence
  Description of Artificial Sequence: Synthetic oligonucleotide
ggttagcgttgcgcgg

SEQ ID NO: 12408 - DNA, 22 bp, Artificial Sequence
  Description of Artificial Sequence: Synthetic oligonucleotide
cgtacaaatcaacgtaaaaata

SEQ ID NO: 12409 - DNA, 21 bp, Artificial Sequence
  Description of Artificial Sequence: Synthetic oligonucleotide
acatctcgaaaaacgctactc

SEQ ID NO: 12410 - DNA, 20 bp, Artificial Sequence
  Description of Artificial Sequence: Synthetic oligonucleotide
catctcgaaaaacgctactc

SEQ ID NO: 12411 - DNA, 20 bp, Artificial Sequence
  Description of Artificial Sequence: Synthetic oligonucleotide
ttattgtatttagcggagcg

SEQ ID NO: 12412 - DNA, 21 bp, Artificial Sequence
  Description of Artificial Sequence: Synthetic oligonucleotide
tcgacgacgtatctatctaca

SEQ ID NO: 12413 - DNA, 20 bp, Artificial Sequence
  Description of Artificial Sequence: Synthetic oligonucleotide
gtatttagcggagcgttttc

SEQ ID NO: 12414 - DNA, 18 bp, Artificial Sequence
  Description of Artificial Sequence: Synthetic oligonucleotide
tgttgtcgttggagttaa

SEQ ID NO: 12415 - DNA, 18 bp, Artificial Sequence
  Description of Artificial Sequence: Synthetic oligonucleotide
cgaacgtctcacctacga

SEQ ID NO: 12416 - DNA, 17 bp, Artificial Sequence
  Description of Artificial Sequence: Synthetic oligonucleotide
gtcgttgtcgtttacga

SEQ ID NO: 12417 - DNA, 19 bp, Artificial Sequence
  Description of Artificial Sequence: Synthetic oligonucleotide
caacgccacgataaaaata

SEQ ID NO: 12418 - DNA, 21 bp, Artificial Sequence
  Description of Artificial Sequence: Synthetic oligonucleotide
tttttacgttgatttgtacgg

SEQ ID NO: 12419 - DNA, 18 bp, Artificial Sequence
  Description of Artificial Sequence: Synthetic oligonucleotide
aaacgtaacgcccgtaat

SEQ ID NO: 12420 - DNA, 22 bp, Artificial Sequence
  Description of Artificial Sequence: Synthetic oligonucleotide
tgttcgttatttattcgtggta

SEQ ID NO: 12421 - DNA, 23 bp, Artificial Sequence
  Description of Artificial Sequence: Synthetic oligonucleotide
tgcggatagggtaggtttgtcgt

SEQ ID NO: 12422 - DNA, 21 bp, Artificial Sequence
  Description of Artificial Sequence: Synthetic oligonucleotide
ataaacactatacgcgcccta

SEQ ID NO: 12423 - DNA, 19 bp, Artificial Sequence
  Description of Artificial Sequence: Synthetic oligonucleotide
tatttagcggagcgttttc

SEQ ID NO: 12424 - DNA, 20 bp, Artificial Sequence
  Description of Artificial Sequence: Synthetic oligonucleotide
ccgaaactctaacaaaaacg

SEQ ID NO: 12425 - DNA, 24 bp, Artificial Sequence
  Description of Artificial Sequence: Synthetic oligonucleotide
cggttagttattatcgtgtagaag

SEQ ID NO: 12426 - DNA, 20 bp, Artificial Sequence
  Description of Artificial Sequence: Synthetic oligonucleotide
gacggaattttcgggttcgt

SEQ ID NO: 12427 - DNA, 20 bp, Artificial Sequence
  Description of Artificial Sequence: Synthetic oligonucleotide
ggattcgatattgtagttgt

SEQ ID NO: 12428 - DNA, 19 bp, Artificial Sequence
  Description of Artificial Sequence: Synthetic oligonucleotide
aataggtggtcgtcgttgt

SEQ ID NO: 12429 - DNA, 19 bp, Artificial Sequence
  Description of Artificial Sequence: Synthetic oligonucleotide
acgaacgtctcacctacga

SEQ ID NO: 12430 - DNA, 20 bp, Artificial Sequence
  Description of Artificial Sequence: Synthetic oligonucleotide
ctcgaaccaaatcgaaataa

SEQ ID NO: 12431 - DNA, 18 bp, Artificial Sequence
  Description of Artificial Sequence: Synthetic oligonucleotide
agtagcgtttttcgagat

SEQ ID NO: 12432 - DNA, 21 bp, Artificial Sequence
  Description of Artificial Sequence: Synthetic oligonucleotide
aacaacgccacgataaaaata

SEQ ID NO: 12433 - DNA, 19 bp, Artificial Sequence
  Description of Artificial Sequence: Synthetic oligonucleotide
ataaccgaccacgacaaac

SEQ ID NO: 12434 - DNA, 18 bp, Artificial Sequence
  Description of Artificial Sequence: Synthetic oligonucleotide
tggttattgcggataggg

SEQ ID NO: 12435 - DNA, 19 bp, Artificial Sequence
  Description of Artificial Sequence: Synthetic oligonucleotide
aacgacgaccacctattta

SEQ ID NO: 12436 - DNA, 23 bp, Artificial Sequence
  Description of Artificial Sequence: Synthetic oligonucleotide
atctaataaacactatacgcgcc

SEQ ID NO: 12437 - DNA, 19 bp, Artificial Sequence
  Description of Artificial Sequence: Synthetic oligonucleotide
acgatcaaactcatcgacc

SEQ ID NO: 12438 - DNA, 22 bp, Artificial Sequence
  Description of Artificial Sequence: Synthetic oligonucleotide
ttcggttagtgattcgtattag

SEQ ID NO: 12439 - DNA, 20 bp, Artificial Sequence
  Description of Artificial Sequence: Synthetic oligonucleotide
cgtggtcggttatttttatt

SEQ ID NO: 12440 - DNA, 19 bp, Artificial Sequence
  Description of Artificial Sequence: Synthetic oligonucleotide
gatgagcggtagcgatatg

SEQ ID NO: 12441 - DNA, 21 bp, Artificial Sequence
  Description of Artificial Sequence: Synthetic oligonucleotide
accctaaacgataacgaacct

SEQ ID NO: 12442 - DNA, 18 bp, Artificial Sequence
  Description of Artificial Sequence: Synthetic oligonucleotide
cgcgtgagtaggtaggtg

SEQ ID NO: 12443 - DNA, 18 bp, Artificial Sequence
  Description of Artificial Sequence: Synthetic oligonucleotide
cgtgagtaggtaggtgcg

SEQ ID NO: 12444 - DNA, 17 bp, Artificial Sequence
  Description of Artificial Sequence: Synthetic oligonucleotide
tttcgtcggcgtcgggg

SEQ ID NO: 12445 - DNA, 22 bp, Artificial Sequence
  Description of Artificial Sequence: Synthetic oligonucleotide
atatcgaatcctaaacgaaaaa

SEQ ID NO: 12446 - DNA, 18 bp, Artificial Sequence
  Description of Artificial Sequence: Synthetic oligonucleotide
tagcgggcggttagttat

SEQ ID NO: 12447 - DNA, 19 bp, Artificial Sequence
  Description of Artificial Sequence: Synthetic oligonucleotide
tgtagaagttgtcgtagtt

SEQ ID NO: 12448 - DNA, 22 bp, Artificial Sequence
  Description of Artificial Sequence: Synthetic oligonucleotide
aatatcgaatcctaaacgaaaa

SEQ ID NO: 12449 - DNA, 20 bp, Artificial Sequence
  Description of Artificial Sequence: Synthetic oligonucleotide
ccctaaacgataacgaacct

SEQ ID NO: 12450 - DNA, 19 bp, Artificial Sequence
  Description of Artificial Sequence: Synthetic oligonucleotide
gaggagagttttcgtttcg

SEQ ID NO: 12451 - DNA, 23 bp, Artificial Sequence
  Description of Artificial Sequence: Synthetic oligonucleotide
ttcgttttgtgtttcgcggttta

SEQ ID NO: 12452 - DNA, 18 bp, Artificial Sequence
  Description of Artificial Sequence: Synthetic oligonucleotide
ttacgatggttacgttgt

SEQ ID NO: 12453 - DNA, 20 bp, Artificial Sequence
  Description of Artificial Sequence: Synthetic oligonucleotide
ttaagtaggatggcgtttcg

SEQ ID NO: 12454 - DNA, 19 bp, Artificial Sequence
  Description of Artificial Sequence: Synthetic oligonucleotide
gacgatcacgacctcttta

SEQ ID NO: 12455 - DNA, 22 bp, Artificial Sequence
  Description of Artificial Sequence: Synthetic oligonucleotide
tttagggtagttagtacgagcg

SEQ ID NO: 12456 - DNA, 17 bp, Artificial Sequence
  Description of Artificial Sequence: Synthetic oligonucleotide
gtcgcgggatttaacgt

SEQ ID NO: 12457 - DNA, 19 bp, Artificial Sequence
  Description of Artificial Sequence: Synthetic oligonucleotide
ggatgattagttttgggaa

SEQ ID NO: 12458 - DNA, 19 bp, Artificial Sequence
  Description of Artificial Sequence: Synthetic oligonucleotide
acaacgccacgataaaaat

SEQ ID NO: 12459 - DNA, 22 bp, Artificial Sequence
  Description of Artificial Sequence: Synthetic oligonucleotide
taataaacactatacgcgccct

SEQ ID NO: 12460 - DNA, 22 bp, Artificial Sequence
  Description of Artificial Sequence: Synthetic oligonucleotide
aataaacactatacgcgcccta

SEQ ID NO: 12461 - DNA, 21 bp, Artificial Sequence
  Description of Artificial Sequence: Synthetic oligonucleotide
gaatcggtagttgaagattcg

SEQ ID NO: 12462 - DNA, 22 bp, Artificial Sequence
  Description of Artificial Sequence: Synthetic oligonucleotide
cccgtaaacgataacaaaaata

SEQ ID NO: 12463 - DNA, 16 bp, Artificial Sequence
  Description of Artificial Sequence: Synthetic oligonucleotide
gaagtcgtcggatcgg

SEQ ID NO: 12464 - DNA, 21 bp, Artificial Sequence
  Description of Artificial Sequence: Synthetic oligonucleotide
gttggggatttttttgttaaa

SEQ ID NO: 12465 - DNA, 22 bp, Artificial Sequence
  Description of Artificial Sequence: Synthetic oligonucleotide
agaatcggtagttgaagattcg

SEQ ID NO: 12466 - DNA, 17 bp, Artificial Sequence
  Description of Artificial Sequence: Synthetic oligonucleotide
tttgagacggatggtgt

SEQ ID NO: 12467 - DNA, 20 bp, Artificial Sequence
  Description of Artificial Sequence: Synthetic oligonucleotide
aatcggtagttgaagattcg

SEQ ID NO: 12468 - DNA, 22 bp, Artificial Sequence
  Description of Artificial Sequence: Synthetic oligonucleotide
acgtctaaaacgaaacttaaaa

SEQ ID NO: 12469 - DNA, 22 bp, Artificial Sequence
  Description of Artificial Sequence: Synthetic oligonucleotide
agtaaggatagtcgttgtcgtc

SEQ ID NO: 12470 - DNA, 17 bp, Artificial Sequence
  Description of Artificial Sequence: Synthetic oligonucleotide
agtattcgattcggcga

SEQ ID NO: 12471 - DNA, 18 bp, Artificial Sequence
  Description of Artificial Sequence: Synthetic oligonucleotide
ggagtgtttgatagaagg

SEQ ID NO: 12472 - DNA, 20 bp, Artificial Sequence
  Description of Artificial Sequence: Synthetic oligonucleotide
cgaacaaaattaacgattcc

SEQ ID NO: 12473 - DNA, 18 bp, Artificial Sequence
  Description of Artificial Sequence: Synthetic oligonucleotide
ttcgttttagacgttcgt

SEQ ID NO: 12474 - DNA, 22 bp, Artificial Sequence
  Description of Artificial Sequence: Synthetic oligonucleotide
aaaactcgaacaaaattaacga

SEQ ID NO: 12475 - DNA, 21 bp, Artificial Sequence
  Description of Artificial Sequence: Synthetic oligonucleotide
gtttttagtattcgattcggc

SEQ ID NO: 12476 - DNA, 23 bp, Artificial Sequence
  Description of Artificial Sequence: Synthetic oligonucleotide
gttatgtattattcgttttagga

SEQ ID NO: 12477 - DNA, 22 bp, Artificial Sequence
  Description of Artificial Sequence: Synthetic oligonucleotide
aaaaactcgaacaaaattaacg

SEQ ID NO: 12478 - DNA, 20 bp, Artificial Sequence
  Description of Artificial Sequence: Synthetic oligonucleotide
tttttagtattcgattcggc

SEQ ID NO: 12479 - DNA, 23 bp, Artificial Sequence
  Description of Artificial Sequence: Synthetic oligonucleotide
ttatgtattattcgttttaggaa

SEQ ID NO: 12480 - DNA, 20 bp, Artificial Sequence
  Description of Artificial Sequence: Synthetic oligonucleotide
gccgaatcgaatactaaaaa

SEQ ID NO: 12481 - DNA, 22 bp, Artificial Sequence
  Description of Artificial Sequence: Synthetic oligonucleotide
ttagggtagttgtcgtcgttat

SEQ ID NO: 12482 - DNA, 16 bp, Artificial Sequence
  Description of Artificial Sequence: Synthetic oligonucleotide
gtcgttcgtgagcgat

SEQ ID NO: 12483 - DNA, 22 bp, Artificial Sequence
  Description of Artificial Sequence: Synthetic oligonucleotide
attagggtagttgtcgtcgtta

SEQ ID NO: 12484 - DNA, 22 bp, Artificial Sequence
  Description of Artificial Sequence: Synthetic oligonucleotide
taaaacgaaacttaaaaatcgc

SEQ ID NO: 12485 - DNA, 24 bp, Artificial Sequence
  Description of Artificial Sequence: Synthetic oligonucleotide
taatagtaaggatagtcgttgtcg

SEQ ID NO: 12486 - DNA, 21 bp, Artificial Sequence
  Description of Artificial Sequence: Synthetic oligonucleotide
aaaacgaaacttaaaaatcgc

SEQ ID NO: 12487 - DNA, 23 bp, Artificial Sequence
  Description of Artificial Sequence: Synthetic oligonucleotide
aatagtaaggatagtcgttgtcg

SEQ ID NO: 12488 - DNA, 21 bp, Artificial Sequence
  Description of Artificial Sequence: Synthetic oligonucleotide
tcgaacaaaattaacgattcc

SEQ ID NO: 12489 - DNA, 22 bp, Artificial Sequence
  Description of Artificial Sequence: Synthetic oligonucleotide
ctcgaacaaaattaacgattcc

SEQ ID NO: 12490 - DNA, 21 bp, Artificial Sequence
  Description of Artificial Sequence: Synthetic oligonucleotide
gccgaatcgaatactaaaaac

SEQ ID NO: 12491 - DNA, 19 bp, Artificial Sequence
  Description of Artificial Sequence: Synthetic oligonucleotide
taggagtgtttgatagaag

SEQ ID NO: 12492 - DNA, 21 bp, Artificial Sequence
  Description of Artificial Sequence: Synthetic oligonucleotide
aattagggtagttgtcgtcgt

SEQ ID NO: 12493 - DNA, 21 bp, Artificial Sequence
  Description of Artificial Sequence: Synthetic oligonucleotide
aaactcgaacaaaattaacga

SEQ ID NO: 12494 - DNA, 23 bp, Artificial Sequence
  Description of Artificial Sequence: Synthetic oligonucleotide
tagtaaggatagtcgttgtcgtc

SEQ ID NO: 12495 - DNA, 22 bp, Artificial Sequence
  Description of Artificial Sequence: Synthetic oligonucleotide
cgtctaaaacgaaacttaaaaa

SEQ ID NO: 12496 - DNA, 25 bp, Artificial Sequence
  Description of Artificial Sequence: Synthetic oligonucleotide
ataatagtaaggatagtcgttgtcg

SEQ ID NO: 12497 - DNA, 21 bp, Artificial Sequence
  Description of Artificial Sequence: Synthetic oligonucleotide
gtaaggatagtcgttgtcgtc

SEQ ID NO: 12498 - DNA, 23 bp, Artificial Sequence
  Description of Artificial Sequence: Synthetic oligonucleotide
atagtaaggatagtcgttgtcgt

SEQ ID NO: 12499 - DNA, 21 bp, Artificial Sequence
  Description of Artificial Sequence: Synthetic oligonucleotide
cgtctaaaacgaaacttaaaa

SEQ ID NO: 12500 - DNA, 21 bp, Artificial Sequence
  Description of Artificial Sequence: Synthetic oligonucleotide
tagggtagttgtcgtcgttat

SEQ ID NO: 12501 - DNA, 22 bp, Artificial Sequence
  Description of Artificial Sequence: Synthetic oligonucleotide
aaattaacgattcctaaaacga

SEQ ID NO: 12502 - DNA, 18 bp, Artificial Sequence
  Description of Artificial Sequence: Synthetic oligonucleotide
cgtgagcgatgataggag

SEQ ID NO: 12503 - DNA, 21 bp, Artificial Sequence
  Description of Artificial Sequence: Synthetic oligonucleotide
gatagaagggtttttagtatt

SEQ ID NO: 12504 - DNA, 22 bp, Artificial Sequence
  Description of Artificial Sequence: Synthetic oligonucleotide
aactcgaacaaaattaacgatt

SEQ ID NO: 12505 - DNA, 20 bp, Artificial Sequence
  Description of Artificial Sequence: Synthetic oligonucleotide
taaggatagtcgttgtcgtc

SEQ ID NO: 12506 - DNA, 22 bp, Artificial Sequence
  Description of Artificial Sequence: Synthetic oligonucleotide
aaactcgaacaaaattaacgat

SEQ ID NO: 12507-12844 - skipped (338 entries)

SEQ ID NO: 12845 - DNA, 22 bp, Artificial Sequence
  Description of Artificial Sequence: Synthetic oligonucleotide
gcgtgaatatgcgttagagtag

SEQ ID NO: 12846 - DNA, 22 bp, Artificial Sequence
  Description of Artificial Sequence: Synthetic oligonucleotide
cgacatcgtaaaactaaacgta

SEQ ID NO: 12847 - DNA, 21 bp, Artificial Sequence
  Description of Artificial Sequence: Synthetic oligonucleotide
gtcgggtatcgatattatcgt

SEQ ID NO: 12848 - DNA, 16 bp, Artificial Sequence
  Description of Artificial Sequence: Synthetic oligonucleotide
tagcgtcgggttacgt

SEQ ID NO: 12849 - DNA, 22 bp, Artificial Sequence
  Description of Artificial Sequence: Synthetic oligonucleotide
cgtgaatatgcgttagagtagc

SEQ ID NO: 12850 - DNA, 22 bp, Artificial Sequence
  Description of Artificial Sequence: Synthetic oligonucleotide
aatatgcgttagagtagcgagt

SEQ ID NO: 12851 - DNA, 20 bp, Artificial Sequence
  Description of Artificial Sequence: Synthetic oligonucleotide
gacaataactcctcgtcgtc

SEQ ID NO: 12852 - DNA, 23 bp, Artificial Sequence
  Description of Artificial Sequence: Synthetic oligonucleotide
tacgtttagttttacgatgtcgg

SEQ ID NO: 12853 - DNA, 22 bp, Artificial Sequence
  Description of Artificial Sequence: Synthetic oligonucleotide
atcgtgtagcgtcgggttacgt

SEQ ID NO: 12854 - DNA, 21 bp, Artificial Sequence
  Description of Artificial Sequence: Synthetic oligonucleotide
gaatatgcgttagagtagcga

SEQ ID NO: 12855 - DNA, 21 bp, Artificial Sequence
  Description of Artificial Sequence: Synthetic oligonucleotide
acgaaaacgacaataactcct

SEQ ID NO: 12856 - DNA, 16 bp, Artificial Sequence
  Description of Artificial Sequence: Synthetic oligonucleotide
gtggtttcgcggagga

SEQ ID NO: 12857 - DNA, 21 bp, Artificial Sequence
  Description of Artificial Sequence: Synthetic oligonucleotide
aggagttattgtcgttttcgt

SEQ ID NO: 12858 - DNA, 22 bp, Artificial Sequence
  Description of Artificial Sequence: Synthetic oligonucleotide
taaatacaacgcgacttcctac

SEQ ID NO: 12859 - DNA, 25 bp, Artificial Sequence
  Description of Artificial Sequence: Synthetic oligonucleotide
gtcgttttcgttgggtaatttacgt

SEQ ID NO: 12860 - DNA, 18 bp, Artificial Sequence
  Description of Artificial Sequence: Synthetic oligonucleotide
gttatgatagagaggtgg

SEQ ID NO: 12861 - DNA, 22 bp, Artificial Sequence
  Description of Artificial Sequence: Synthetic oligonucleotide
ctaaatacaacgcgacttccta

SEQ ID NO: 12862 - DNA, 21 bp, Artificial Sequence
  Description of Artificial Sequence: Synthetic oligonucleotide
gtttagttttacgatgtcggg

SEQ ID NO: 12863 - DNA, 22 bp, Artificial Sequence
  Description of Artificial Sequence: Synthetic oligonucleotide
taactctaacgaacaacacacg

SEQ ID NO: 12864 - DNA, 21 bp, Artificial Sequence
  Description of Artificial Sequence: Synthetic oligonucleotide
gtcgtcgttttcgttgggtaa

SEQ ID NO: 12865 - DNA, 19 bp, Artificial Sequence
  Description of Artificial Sequence: Synthetic oligonucleotide
gacgaggagttattgtcgt

SEQ ID NO: 12866 - DNA, 20 bp, Artificial Sequence
  Description of Artificial Sequence: Synthetic oligonucleotide
tttagttttacgatgtcggg

SEQ ID NO: 12867 - DNA, 21 bp, Artificial Sequence
  Description of Artificial Sequence: Synthetic oligonucleotide
gacgaggagttattgtcgttt

SEQ ID NO: 12868 - DNA, 22 bp, Artificial Sequence
  Description of Artificial Sequence: Synthetic oligonucleotide
gttagagtagcgagtcgggtat

SEQ ID NO: 12869 - DNA, 21 bp, Artificial Sequence
  Description of Artificial Sequence: Synthetic oligonucleotide
gacgaaaacgacaataactcc

SEQ ID NO: 12870 - DNA, 21 bp, Artificial Sequence
  Description of Artificial Sequence: Synthetic oligonucleotide
ttagagtagcgagtcgggtat

SEQ ID NO: 12871 - DNA, 20 bp, Artificial Sequence
  Description of Artificial Sequence: Synthetic oligonucleotide
cgaaaacgacaataactcct

SEQ ID NO: 12872 - DNA, 22 bp, Artificial Sequence
  Description of Artificial Sequence: Synthetic oligonucleotide
gaatatgcgttagagtagcgag

SEQ ID NO: 12873 - DNA, 23 bp, Artificial Sequence
  Description of Artificial Sequence: Synthetic oligonucleotide
cgacatcgtaaaactaaacgtaa

SEQ ID NO: 12874 - DNA, 21 bp, Artificial Sequence
  Description of Artificial Sequence: Synthetic oligonucleotide
atcgatattatcgtgtagcgt

SEQ ID NO: 12875 - DNA, 20 bp, Artificial Sequence
  Description of Artificial Sequence: Synthetic oligonucleotide
gggttacgtatatttggttt

SEQ ID NO: 12876 - DNA, 21 bp, Artificial Sequence
  Description of Artificial Sequence: Synthetic oligonucleotide
acgacgaaaacgacaataact

SEQ ID NO: 12877 - DNA, 21 bp, Artificial Sequence
  Description of Artificial Sequence: Synthetic oligonucleotide
cccgacatcgtaaaactaaac

SEQ ID NO: 12878 - DNA, 20 bp, Artificial Sequence
  Description of Artificial Sequence: Synthetic oligonucleotide
cgacgaaaacgacaataact

SEQ ID NO: 12879 - DNA, 21 bp, Artificial Sequence
  Description of Artificial Sequence: Synthetic oligonucleotide
aaatacaacgcgacttcctac

SEQ ID NO: 12880 - DNA, 22 bp, Artificial Sequence
  Description of Artificial Sequence: Synthetic oligonucleotide
gaggagttattgtcgttttcgt

SEQ ID NO: 12881 - DNA, 22 bp, Artificial Sequence
  Description of Artificial Sequence: Synthetic oligonucleotide
acgaggagttattgtcgttttc

SEQ ID NO: 12882 - DNA, 20 bp, Artificial Sequence
  Description of Artificial Sequence: Synthetic oligonucleotide
cctaaatacaacgcgacttc

SEQ ID NO: 12883 - DNA, 20 bp, Artificial Sequence
  Description of Artificial Sequence: Synthetic oligonucleotide
tcctaaatacaacgcgactt

SEQ ID NO: 12884 - DNA, 21 bp, Artificial Sequence
  Description of Artificial Sequence: Synthetic oligonucleotide
acgaggagttattgtcgtttt

SEQ ID NO: 12885 - DNA, 21 bp, Artificial Sequence
  Description of Artificial Sequence: Synthetic oligonucleotide
cgaggagttattgtcgttttc

SEQ ID NO: 12886 - DNA, 21 bp, Artificial Sequence
  Description of Artificial Sequence: Synthetic oligonucleotide
ctcctaaatacaacgcgactt

SEQ ID NO: 12887 - DNA, 21 bp, Artificial Sequence
  Description of Artificial Sequence: Synthetic oligonucleotide
aactctaacgaacaacacacg

SEQ ID NO: 12888 - DNA, 19 bp, Artificial Sequence
  Description of Artificial Sequence: Synthetic oligonucleotide
caataactcctcgtcgtcc

SEQ ID NO: 12889 - DNA, 22 bp, Artificial Sequence
  Description of Artificial Sequence: Synthetic oligonucleotide
ttacgtttagttttacgatgtc

SEQ ID NO: 12890 - DNA, 20 bp, Artificial Sequence
  Description of Artificial Sequence: Synthetic oligonucleotide
ggagttattgtcgttttcgt

SEQ ID NO: 12891 - DNA, 20 bp, Artificial Sequence
  Description of Artificial Sequence: Synthetic oligonucleotide
acaataactcctcgtcgtcc

SEQ ID NO: 12892 - DNA, 22 bp, Artificial Sequence
  Description of Artificial Sequence: Synthetic oligonucleotide
acgtttagttttacgatgtcgg

SEQ ID NO: 12893 - DNA, 19 bp, Artificial Sequence
  Description of Artificial Sequence: Synthetic oligonucleotide
cgacgaaaacgacaataac

SEQ ID NO: 12894 - DNA, 19 bp, Artificial Sequence
  Description of Artificial Sequence: Synthetic oligonucleotide
acgacgaaaacgacaataa

SEQ ID NO: 12895 - DNA, 20 bp, Artificial Sequence
  Description of Artificial Sequence: Synthetic oligonucleotide
aatacaacgcgacttcctac

SEQ ID NO: 12896 - DNA, 21 bp, Artificial Sequence
  Description of Artificial Sequence: Synthetic oligonucleotide
gcgtgaatatgcgttagagta

SEQ ID NO: 12897 - DNA, 21 bp, Artificial Sequence
  Description of Artificial Sequence: Synthetic oligonucleotide
tacgatgtcggggaagagcgg

SEQ ID NO: 12898 - DNA, 21 bp, Artificial Sequence
  Description of Artificial Sequence: Synthetic oligonucleotide
aatatgcgttagagtagcgag

SEQ ID NO: 12899 - DNA, 21 bp, Artificial Sequence
  Description of Artificial Sequence: Synthetic oligonucleotide
cgtttagttttacgatgtcgg

SEQ ID NO: 12900 - DNA, 20 bp, Artificial Sequence
  Description of Artificial Sequence: Synthetic oligonucleotide
ctcctaaatacaacgcgact

SEQ ID NO: 12901 - DNA, 20 bp, Artificial Sequence
  Description of Artificial Sequence: Synthetic oligonucleotide
aaaacgacaataactcctcg

SEQ ID NO: 12902 - DNA, 21 bp, Artificial Sequence
  Description of Artificial Sequence: Synthetic oligonucleotide
gaaaacgacaataactcctcg

SEQ ID NO: 12903 - DNA, 19 bp, Artificial Sequence
  Description of Artificial Sequence: Synthetic oligonucleotide
attttcggaagtttgtcgt

SEQ ID NO: 12904 - DNA, 21 bp, Artificial Sequence
  Description of Artificial Sequence: Synthetic oligonucleotide
cgcgtctctctactttcaata

SEQ ID NO: 12905 - DNA, 18 bp, Artificial Sequence
  Description of Artificial Sequence: Synthetic oligonucleotide
atgcgtggtcgttttcgg

SEQ ID NO: 12906 - DNA, 19 bp, Artificial Sequence
  Description of Artificial Sequence: Synthetic oligonucleotide
agttgcggtttgttatcgt

SEQ ID NO: 12907 - DNA, 20 bp, Artificial Sequence
  Description of Artificial Sequence: Synthetic oligonucleotide
tagagtagcgagtcgggtat

SEQ ID NO: 12908 - DNA, 20 bp, Artificial Sequence
  Description of Artificial Sequence: Synthetic oligonucleotide
acgaaaacgacaataactcc

SEQ ID NO: 12909 - DNA, 22 bp, Artificial Sequence
  Description of Artificial Sequence: Synthetic oligonucleotide
gacatcgtaaaactaaacgtaa

SEQ ID NO: 12910 - DNA, 22 bp, Artificial Sequence
  Description of Artificial Sequence: Synthetic oligonucleotide
tgaatatgcgttagagtagcga

SEQ ID NO: 12911 - DNA, 21 bp, Artificial Sequence
  Description of Artificial Sequence: Synthetic oligonucleotide
atttttcgcgtctctctactt

SEQ ID NO: 12912 - DNA, 21 bp, Artificial Sequence
  Description of Artificial Sequence: Synthetic oligonucleotide
aatttttcgcgtctctctact

SEQ ID NO: 12913 - DNA, 20 bp, Artificial Sequence
  Description of Artificial Sequence: Synthetic oligonucleotide
aagtcgcgttgtatttagga

SEQ ID NO: 12914 - DNA, 20 bp, Artificial Sequence
  Description of Artificial Sequence: Synthetic oligonucleotide
gacgaaacgcaaaactaaac

SEQ ID NO: 12915 - DNA, 16 bp, Artificial Sequence
  Description of Artificial Sequence: Synthetic oligonucleotide
ttcggaattcggacgt

SEQ ID NO: 12916 - DNA, 20 bp, Artificial Sequence
  Description of Artificial Sequence: Synthetic oligonucleotide
tgtaatcgtttttttcggag

SEQ ID NO: 12917 - DNA, 19 bp, Artificial Sequence
  Description of Artificial Sequence: Synthetic oligonucleotide
aataactcctcgtcgtcct

SEQ ID NO: 12918 - DNA, 23 bp, Artificial Sequence
  Description of Artificial Sequence: Synthetic oligonucleotide
ataactctaacgaacaacacacg

SEQ ID NO: 12919 - DNA, 21 bp, Artificial Sequence
  Description of Artificial Sequence: Synthetic oligonucleotide
atatgcgttagagtagcgagt

SEQ ID NO: 12920 - DNA, 20 bp, Artificial Sequence
  Description of Artificial Sequence: Synthetic oligonucleotide
cgaggagttattgtcgtttt

SEQ ID NO: 12921 - DNA, 20 bp, Artificial Sequence
  Description of Artificial Sequence: Synthetic oligonucleotide
atattatcgtgtagcgtcgg

SEQ ID NO: 12922 - DNA, 16 bp, Artificial Sequence
  Description of Artificial Sequence: Synthetic oligonucleotide
agcggtggtttcgcgg

SEQ ID NO: 12923 - DNA, 22 bp, Artificial Sequence
  Description of Artificial Sequence: Synthetic oligonucleotide
tatcgccccgaaaataaaaata

SEQ ID NO: 12924 - DNA, 22 bp, Artificial Sequence
  Description of Artificial Sequence: Synthetic oligonucleotide
aattaacgatggtaggtcgtag

SEQ ID NO: 12925 - DNA, 21 bp, Artificial Sequence
  Description of Artificial Sequence: Synthetic oligonucleotide
agcgtttagtttcgtaggcgg

SEQ ID NO: 12926 - DNA, 16 bp, Artificial Sequence
  Description of Artificial Sequence: Synthetic oligonucleotide
agggtcggaggcggtt

SEQ ID NO: 12927 - DNA, 22 bp, Artificial Sequence
  Description of Artificial Sequence: Synthetic oligonucleotide
attaacgatggtaggtcgtagt

SEQ ID NO: 12928 - DNA, 22 bp, Artificial Sequence
  Description of Artificial Sequence: Synthetic oligonucleotide
cgaaccaactcctacgactact

SEQ ID NO: 12929 - DNA, 20 bp, Artificial Sequence
  Description of Artificial Sequence: Synthetic oligonucleotide
ggttaggtgtacgtgattcg

SEQ ID NO: 12930 - DNA, 17 bp, Artificial Sequence
  Description of Artificial Sequence: Synthetic oligonucleotide
gtcggtgttcgattcgt

SEQ ID NO: 12931 - DNA, 18 bp, Artificial Sequence
  Description of Artificial Sequence: Synthetic oligonucleotide
ttggcgtatgtttacgta

SEQ ID NO: 12932 - DNA, 20 bp, Artificial Sequence
  Description of Artificial Sequence: Synthetic oligonucleotide
aaccgcctactctaataccg

SEQ ID NO: 12933 - DNA, 21 bp, Artificial Sequence
  Description of Artificial Sequence: Synthetic oligonucleotide
gtggagttagtagtttcgcgt

SEQ ID NO: 12934 - DNA, 16 bp, Artificial Sequence
  Description of Artificial Sequence: Synthetic oligonucleotide
ttcgttcggtaagcga

SEQ ID NO: 12935 - DNA, 19 bp, Artificial Sequence
  Description of Artificial Sequence: Synthetic oligonucleotide
gttcgcgtttaagatgtaa

SEQ ID NO: 12936 - DNA, 20 bp, Artificial Sequence
  Description of Artificial Sequence: Synthetic oligonucleotide
gagttagtagtttcgcgtgg

SEQ ID NO: 12937 - DNA, 20 bp, Artificial Sequence
  Description of Artificial Sequence: Synthetic oligonucleotide
tggagttagtagtttcgcgt

SEQ ID NO: 12938 - DNA, 19 bp, Artificial Sequence
  Description of Artificial Sequence: Synthetic oligonucleotide
gaaaccgaacgatacgaac

SEQ ID NO: 12939 - DNA, 21 bp, Artificial Sequence
  Description of Artificial Sequence: Synthetic oligonucleotide
tacggtattagagtaggcggt

SEQ ID NO: 12940 - DNA, 16 bp, Artificial Sequence
  Description of Artificial Sequence: Synthetic oligonucleotide
ggcgggcggagcgtat

SEQ ID NO: 12941 - DNA, 16 bp, Artificial Sequence
  Description of Artificial Sequence: Synthetic oligonucleotide
gtttggagcgcgcggg

SEQ ID NO: 12942 - DNA, 20 bp, Artificial Sequence
  Description of Artificial Sequence: Synthetic oligonucleotide
acgtaaacatacgccaaaac

SEQ ID NO: 12943 - DNA, 20 bp, Artificial Sequence
  Description of Artificial Sequence: Synthetic oligonucleotide
atatcgtggagttgaacgtg

SEQ ID NO: 12944 - DNA, 22 bp, Artificial Sequence
  Description of Artificial Sequence: Synthetic oligonucleotide
tatgtgatttggtgttgtatgg

SEQ ID NO: 12945 - DNA, 18 bp, Artificial Sequence
  Description of Artificial Sequence: Synthetic oligonucleotide
ctatcgccccgaaaataa

SEQ ID NO: 12946 - DNA, 17 bp, Artificial Sequence
  Description of Artificial Sequence: Synthetic oligonucleotide
gtcggaggcggttacgt

SEQ ID NO: 12947 - DNA, 18 bp, Artificial Sequence
  Description of Artificial Sequence: Synthetic oligonucleotide
tgttggaagcgtttagtt

SEQ ID NO: 12948 - DNA, 17 bp, Artificial Sequence
  Description of Artificial Sequence: Synthetic oligonucleotide
tatcgccccgaaaataa

SEQ ID NO: 12949 - DNA, 22 bp, Artificial Sequence
  Description of Artificial Sequence: Synthetic oligonucleotide
ttaacgatggtaggtcgtagtt

SEQ ID NO: 12950 - DNA, 19 bp, Artificial Sequence
  Description of Artificial Sequence: Synthetic oligonucleotide
accgcctactctaataccg

SEQ ID NO: 12951 - DNA, 21 bp, Artificial Sequence
  Description of Artificial Sequence: Synthetic oligonucleotide
aaaccgcctactctaataccg

SEQ ID NO: 12952 - DNA, 20 bp, Artificial Sequence
  Description of Artificial Sequence: Synthetic oligonucleotide
ttcgcgtttaagatgtaaat

SEQ ID NO: 12953 - DNA, 20 bp, Artificial Sequence
  Description of Artificial Sequence: Synthetic oligonucleotide
ccgaatcacgtacacctaac

SEQ ID NO: 12954 - DNA, 19 bp, Artificial Sequence
  Description of Artificial Sequence: Synthetic oligonucleotide
ggtagtggtttttcgtcgt

SEQ ID NO: 12955 - DNA, 23 bp, Artificial Sequence
  Description of Artificial Sequence: Synthetic oligonucleotide
ttcgatatcgtggagttgaacgt

SEQ ID NO: 12956 - DNA, 17 bp, Artificial Sequence
  Description of Artificial Sequence: Synthetic oligonucleotide
ttcgcggagttatcgtt

SEQ ID NO: 12957 - DNA, 22 bp, Artificial Sequence
  Description of Artificial Sequence: Synthetic oligonucleotide
ttacggtattagagtaggcggt

SEQ ID NO: 12958 - DNA, 22 bp, Artificial Sequence
  Description of Artificial Sequence: Synthetic oligonucleotide
gttacggtattagagtaggcgg

SEQ ID NO: 12959 - DNA, 21 bp, Artificial Sequence
  Description of Artificial Sequence: Synthetic oligonucleotide
atcgccccgaaaataaaaata

SEQ ID NO: 12960 - DNA, 19 bp, Artificial Sequence
  Description of Artificial Sequence: Synthetic oligonucleotide
tatcgtggagttgaacgtg

SEQ ID NO: 12961 - DNA, 22 bp, Artificial Sequence
  Description of Artificial Sequence: Synthetic oligonucleotide
ttagtaatttcggtttttcgtt

SEQ ID NO: 12962 - DNA, 20 bp, Artificial Sequence
  Description of Artificial Sequence: Synthetic oligonucleotide
cccgaatacgctaaaaataa

SEQ ID NO: 12963 - DNA, 18 bp, Artificial Sequence
  Description of Artificial Sequence: Synthetic oligonucleotide
tttgtgtgggggatatgg

SEQ ID NO: 12964 - DNA, 19 bp, Artificial Sequence
  Description of Artificial Sequence: Synthetic oligonucleotide
ttcgttttttaggcgtgta

SEQ ID NO: 12965 - DNA, 22 bp, Artificial Sequence
  Description of Artificial Sequence: Synthetic oligonucleotide
tagtaatttcggtttttcgttt

SEQ ID NO: 12966 - DNA, 20 bp, Artificial Sequence
  Description of Artificial Sequence: Synthetic oligonucleotide
tcccgaatacgctaaaaata

SEQ ID NO: 12967 - DNA, 21 bp, Artificial Sequence
  Description of Artificial Sequence: Synthetic oligonucleotide
ctcccgaatacgctaaaaata

SEQ ID NO: 12968 - DNA, 21 bp, Artificial Sequence
  Description of Artificial Sequence: Synthetic oligonucleotide
atacatctcccgaatacgcta

SEQ ID NO: 12969 - DNA, 22 bp, Artificial Sequence
  Description of Artificial Sequence: Synthetic oligonucleotide
tttagtaatttcggtttttcgt

SEQ ID NO: 12970 - DNA, 22 bp, Artificial Sequence
  Description of Artificial Sequence: Synthetic oligonucleotide
aatacatctcccgaatacgcta

SEQ ID NO: 12971 - DNA, 20 bp, Artificial Sequence
  Description of Artificial Sequence: Synthetic oligonucleotide
tacatctcccgaatacgcta

SEQ ID NO: 12972 - DNA, 22 bp, Artificial Sequence
  Description of Artificial Sequence: Synthetic oligonucleotide
tctcccgaatacgctaaaaata

SEQ ID NO: 12973 - DNA, 21 bp, Artificial Sequence
  Description of Artificial Sequence: Synthetic oligonucleotide
cgaatacgctaaaaataaaca

SEQ ID NO: 12974 - DNA, 22 bp, Artificial Sequence
  Description of Artificial Sequence: Synthetic oligonucleotide
atctcccgaatacgctaaaaat

SEQ ID NO: 12975 - DNA, 21 bp, Artificial Sequence
  Description of Artificial Sequence: Synthetic oligonucleotide
agtaatttcggtttttcgttt

SEQ ID NO: 12976 - DNA, 19 bp, Artificial Sequence
  Description of Artificial Sequence: Synthetic oligonucleotide
acatctcccgaatacgcta

SEQ ID NO: 12977 - DNA, 22 bp, Artificial Sequence
  Description of Artificial Sequence: Synthetic oligonucleotide
ttttagtaatttcggtttttcg

SEQ ID NO: 12978 - DNA, 20 bp, Artificial Sequence
  Description of Artificial Sequence: Synthetic oligonucleotide
atacatctcccgaatacgct

SEQ ID NO: 12979 - DNA, 21 bp, Artificial Sequence
  Description of Artificial Sequence: Synthetic oligonucleotide
ttcggttcgttttttaggcgt

SEQ ID NO: 12980 - DNA, 18 bp, Artificial Sequence
  Description of Artificial Sequence: Synthetic oligonucleotide
ttcgcgcgggggatacgg

SEQ ID NO: 12981 - DNA, 22 bp, Artificial Sequence
  Description of Artificial Sequence: Synthetic oligonucleotide
aaatacatctcccgaatacgct

SEQ ID NO: 12982 - DNA, 21 bp, Artificial Sequence
  Description of Artificial Sequence: Synthetic oligonucleotide
taggttgttttagtcggtcgt

SEQ ID NO: 12983 - DNA, 22 bp, Artificial Sequence
  Description of Artificial Sequence: Synthetic oligonucleotide
ctccgataaccgttttaatatc

SEQ ID NO: 12984 - DNA, 17 bp, Artificial Sequence
  Description of Artificial Sequence: Synthetic oligonucleotide
gtcgcggcgattggcga

SEQ ID NO: 12985 - DNA, 20 bp, Artificial Sequence
  Description of Artificial Sequence: Synthetic oligonucleotide
gaagaagagtaagcgattag

SEQ ID NO: 12986 - DNA, 21 bp, Artificial Sequence
  Description of Artificial Sequence: Synthetic oligonucleotide
gttgttttagtcggtcgttgt

SEQ ID NO: 12987 - DNA, 22 bp, Artificial Sequence
  Description of Artificial Sequence: Synthetic oligonucleotide
aaccgttttaatatcctaatcg

SEQ ID NO: 12988 - DNA, 17 bp, Artificial Sequence
  Description of Artificial Sequence: Synthetic oligonucleotide
aggaggcgaagaagagt

SEQ ID NO: 12989 - DNA, 20 bp, Artificial Sequence
  Description of Artificial Sequence: Synthetic oligonucleotide
ttgttttagtcggtcgttgt

SEQ ID NO: 12990 - DNA, 19 bp, Artificial Sequence
  Description of Artificial Sequence: Synthetic oligonucleotide
agaagagtaagcgattagg

SEQ ID NO: 12991 - DNA, 22 bp, Artificial Sequence
  Description of Artificial Sequence: Synthetic oligonucleotide
ttaggttgttttagtcggtcgt

SEQ ID NO: 12992 - DNA, 22 bp, Artificial Sequence
  Description of Artificial Sequence: Synthetic oligonucleotide
gttaggttgttttagtcggtcg

SEQ ID NO: 12993 - DNA, 19 bp, Artificial Sequence
  Description of Artificial Sequence: Synthetic oligonucleotide
ggttgttttagtcggtcgt

SEQ ID NO: 12994 - DNA, 19 bp, Artificial Sequence
  Description of Artificial Sequence: Synthetic oligonucleotide
gaagagtaagcgattagga

SEQ ID NO: 12995 - DNA, 19 bp, Artificial Sequence
  Description of Artificial Sequence: Synthetic oligonucleotide
aggttgttttagtcggtcg

SEQ ID NO: 12996 - DNA, 23 bp, Artificial Sequence
  Description of Artificial Sequence: Synthetic oligonucleotide
taaccgttttaatatcctaatcg

SEQ ID NO: 12997 - DNA, 21 bp, Artificial Sequence
  Description of Artificial Sequence: Synthetic oligonucleotide
ccgataaccgttttaatatcc

SEQ ID NO: 12998 - DNA, 22 bp, Artificial Sequence
  Description of Artificial Sequence: Synthetic oligonucleotide
accgttttaatatcctaatcgc

SEQ ID NO: 12999 - DNA, 19 bp, Artificial Sequence
  Description of Artificial Sequence: Synthetic oligonucleotide
tgttttagtcggtcgttgt

SEQ ID NO: 13000 - DNA, 21 bp, Artificial Sequence
  Description of Artificial Sequence: Synthetic oligonucleotide
ccgttttaatatcctaatcgc

SEQ ID NO: 13001 - DNA, 22 bp, Artificial Sequence
  Description of Artificial Sequence: Synthetic oligonucleotide
agtatattagtcggtcgagggt

SEQ ID NO: 13002 - DNA, 22 bp, Artificial Sequence
  Description of Artificial Sequence: Synthetic oligonucleotide
tactaaacaaaatcccgaaacg

SEQ ID NO: 13003 - DNA, 16 bp, Artificial Sequence
  Description of Artificial Sequence: Synthetic oligonucleotide
gtttcgcgggcggtag

SEQ ID NO: 13004 - DNA, 17 bp, Artificial Sequence
  Description of Artificial Sequence: Synthetic oligonucleotide
ttgggagttggaggtaa

SEQ ID NO: 13005 - DNA, 20 bp, Artificial Sequence
  Description of Artificial Sequence: Synthetic oligonucleotide
gttgagtagtagcgagcgat

SEQ ID NO: 13006 - DNA, 22 bp, Artificial Sequence
  Description of Artificial Sequence: Synthetic oligonucleotide
aaaatcgacgacctaactaaaa

SEQ ID NO: 13007 - DNA, 18 bp, Artificial Sequence
  Description of Artificial Sequence: Synthetic oligonucleotide
ttcggatttcggtcgcgt

SEQ ID NO: 13008 - DNA, 19 bp, Artificial Sequence
  Description of Artificial Sequence: Synthetic oligonucleotide
gtggagtcgtatatacgtt

SEQ ID NO: 13009 - DNA, 21 bp, Artificial Sequence
  Description of Artificial Sequence: Synthetic oligonucleotide
gtaataggacggaggtttacg

SEQ ID NO: 13010 - DNA, 21 bp, Artificial Sequence
  Description of Artificial Sequence: Synthetic oligonucleotide
gcgtaacaaacgaaaattcta

SEQ ID NO: 13011 - DNA, 21 bp, Artificial Sequence
  Description of Artificial Sequence: Synthetic oligonucleotide
ttcgttggcgtttgttatcgg

SEQ ID NO: 13012 - DNA, 19 bp, Artificial Sequence
  Description of Artificial Sequence: Synthetic oligonucleotide
ggcgagtttcgttgtgtta

SEQ ID NO: 13013 - DNA, 20 bp, Artificial Sequence
  Description of Artificial Sequence: Synthetic oligonucleotide
atacgagagcgcgttagata

SEQ ID NO: 13014 - DNA, 22 bp, Artificial Sequence
  Description of Artificial Sequence: Synthetic oligonucleotide
cgaataactacaaacccgtaat

SEQ ID NO: 13015 - DNA, 18 bp, Artificial Sequence
  Description of Artificial Sequence: Synthetic oligonucleotide
atcgtttttgttcgacgt

SEQ ID NO: 13016 - DNA, 21 bp, Artificial Sequence
  Description of Artificial Sequence: Synthetic oligonucleotide
tagaatttggtagttttttgg

SEQ ID NO: 13017 - DNA, 20 bp, Artificial Sequence
  Description of Artificial Sequence: Synthetic oligonucleotide
gacgttgtaataggacggag

SEQ ID NO: 13018 - DNA, 22 bp, Artificial Sequence
  Description of Artificial Sequence: Synthetic oligonucleotide
cgtaacaaacgaaaattctacc

SEQ ID NO: 13019 - DNA, 20 bp, Artificial Sequence
  Description of Artificial Sequence: Synthetic oligonucleotide
atcgttgagtagtagcgagc

SEQ ID NO: 13020 - DNA, 22 bp, Artificial Sequence
  Description of Artificial Sequence: Synthetic oligonucleotide
cgacgacctaactaaaatatcg

SEQ ID NO: 13021 - DNA, 22 bp, Artificial Sequence
  Description of Artificial Sequence: Synthetic oligonucleotide
aaatcgacgacctaactaaaat

SEQ ID NO: 13022 - DNA, 22 bp, Artificial Sequence
  Description of Artificial Sequence: Synthetic oligonucleotide
gcgtaacaaacgaaaattctac

SEQ ID NO: 13023 - DNA, 22 bp, Artificial Sequence
  Description of Artificial Sequence: Synthetic oligonucleotide
acgaataactacaaacccgtaa

SEQ ID NO: 13024 - DNA, 22 bp, Artificial Sequence
  Description of Artificial Sequence: Synthetic oligonucleotide
tacgaataactacaaacccgta

SEQ ID NO: 13025 - DNA, 21 bp, Artificial Sequence
  Description of Artificial Sequence: Synthetic oligonucleotide
gtttaagaggaattacgagcg

SEQ ID NO: 13026 - DNA, 23 bp, Artificial Sequence
  Description of Artificial Sequence: Synthetic oligonucleotide
aaaaacgcgctaaatataactaa

SEQ ID NO: 13027 - DNA, 17 bp, Artificial Sequence
  Description of Artificial Sequence: Synthetic oligonucleotide
agcgtatttttacgcgg

SEQ ID NO: 13028 - DNA, 20 bp, Artificial Sequence
  Description of Artificial Sequence: Synthetic oligonucleotide
ttataaacgtttggtttcgt

SEQ ID NO: 13029 - DNA, 22 bp, Artificial Sequence
  Description of Artificial Sequence: Synthetic oligonucleotide
agtttaagaggaattacgagcg

SEQ ID NO: 13030 - DNA, 20 bp, Artificial Sequence
  Description of Artificial Sequence: Synthetic oligonucleotide
tttaagaggaattacgagcg

SEQ ID NO: 13031 - DNA, 22 bp, Artificial Sequence
  Description of Artificial Sequence: Synthetic oligonucleotide
gcgctaaatataactaaaacga

SEQ ID NO: 13032 - DNA, 20 bp, Artificial Sequence
  Description of Artificial Sequence: Synthetic oligonucleotide
tagatacgagagcgcgttag

SEQ ID NO: 13033 - DNA, 19 bp, Artificial Sequence
  Description of Artificial Sequence: Synthetic oligonucleotide
tacgagagcgcgttagata

SEQ ID NO: 13034 - DNA, 21 bp, Artificial Sequence
  Description of Artificial Sequence: Synthetic oligonucleotide
tgatcgttgagtagtagcgag

SEQ ID NO: 13035 - DNA, 23 bp, Artificial Sequence
  Description of Artificial Sequence: Synthetic oligonucleotide
cgacctaactaaaatatcgacaa

SEQ ID NO: 13036 - DNA, 23 bp, Artificial Sequence
  Description of Artificial Sequence: Synthetic oligonucleotide
taaaatcgacgacctaactaaaa

SEQ ID NO: 13037 - DNA, 19 bp, Artificial Sequence
  Description of Artificial Sequence: Synthetic oligonucleotide
tagatacgagagcgcgtta

SEQ ID NO: 13038 - DNA, 22 bp, Artificial Sequence
  Description of Artificial Sequence: Synthetic oligonucleotide
atacgaataactacaaacccgt

SEQ ID NO: 13039 - DNA, 23 bp, Artificial Sequence
  Description of Artificial Sequence: Synthetic oligonucleotide
cgctaaatataactaaaacgacc

SEQ ID NO: 13040 - DNA, 20 bp, Artificial Sequence
  Description of Artificial Sequence: Synthetic oligonucleotide
taataggacggaggtttacg

SEQ ID NO: 13041 - DNA, 22 bp, Artificial Sequence
  Description of Artificial Sequence: Synthetic oligonucleotide
aaaacgcgctaaatataactaa

SEQ ID NO: 13042 - DNA, 22 bp, Artificial Sequence
  Description of Artificial Sequence: Synthetic oligonucleotide
agatacgagagcgcgttagata

SEQ ID NO: 13043 - DNA, 21 bp, Artificial Sequence
  Description of Artificial Sequence: Synthetic oligonucleotide
gatacgagagcgcgttagata

SEQ ID NO: 13044 - DNA, 19 bp, Artificial Sequence
  Description of Artificial Sequence: Synthetic oligonucleotide
atacgagagcgcgttagat

SEQ ID NO: 13045 - DNA, 22 bp, Artificial Sequence
  Description of Artificial Sequence: Synthetic oligonucleotide
atatcgacaaaataaaatacgc

SEQ ID NO: 13046 - DNA, 17 bp, Artificial Sequence
  Description of Artificial Sequence: Synthetic oligonucleotide
ttcgttcgtggagtcgt

SEQ ID NO: 13047 - DNA, 23 bp, Artificial Sequence
  Description of Artificial Sequence: Synthetic oligonucleotide
tacgttttttattagaggtacgt

SEQ ID NO: 13048 - DNA, 20 bp, Artificial Sequence
  Description of Artificial Sequence: Synthetic oligonucleotide
ttagatacgagagcgcgtta

SEQ ID NO: 13049 - DNA, 21 bp, Artificial Sequence
  Description of Artificial Sequence: Synthetic oligonucleotide
tttgatcgttgagtagtagcg

SEQ ID NO: 13050 - DNA, 23 bp, Artificial Sequence
  Description of Artificial Sequence: Synthetic oligonucleotide
gacgacctaactaaaatatcgac

SEQ ID NO: 13051 - DNA, 20 bp, Artificial Sequence
  Description of Artificial Sequence: Synthetic oligonucleotide
ttcgtggacgttgtaatagg

SEQ ID NO: 13052 - DNA, 20 bp, Artificial Sequence
  Description of Artificial Sequence: Synthetic oligonucleotide
ttgagtagtagcgagcgatt

SEQ ID NO: 13053 - DNA, 20 bp, Artificial Sequence
  Description of Artificial Sequence: Synthetic oligonucleotide
ttttatcggtttgcgtttat

SEQ ID NO: 13054 - DNA, 21 bp, Artificial Sequence
  Description of Artificial Sequence: Synthetic oligonucleotide
ctcgctactactcaacgatca

SEQ ID NO: 13055 - DNA, 18 bp, Artificial Sequence
  Description of Artificial Sequence: Synthetic oligonucleotide
atcgttttgaatcgtcgt

SEQ ID NO: 13056 - DNA, 28 bp, Artificial Sequence
  Description of Artificial Sequence: Synthetic oligonucleotide
ggcgttttggtttgaatagttcgttcgg

SEQ ID NO: 13057 - DNA, 21 bp, Artificial Sequence
  Description of Artificial Sequence: Synthetic oligonucleotide
cggtagagaaagcgtaagatg

SEQ ID NO: 13058 - DNA, 21 bp, Artificial Sequence
  Description of Artificial Sequence: Synthetic oligonucleotide
aactaacccgataaaacgaac

SEQ ID NO: 13059 - DNA, 16 bp, Artificial Sequence
  Description of Artificial Sequence: Synthetic oligonucleotide
ttcgacgtgacgagag

SEQ ID NO: 13060 - DNA, 18 bp, Artificial Sequence
  Description of Artificial Sequence: Synthetic oligonucleotide
ttcgcgtttcgttttagg

SEQ ID NO: 13061 - DNA, 22 bp, Artificial Sequence
  Description of Artificial Sequence: Synthetic oligonucleotide
tcgacgacctaactaaaatatc

SEQ ID NO: 13062 - DNA, 22 bp, Artificial Sequence
  Description of Artificial Sequence: Synthetic oligonucleotide
tttagatacgagagcgcgttag

SEQ ID NO: 13063 - DNA, 21 bp, Artificial Sequence
  Description of Artificial Sequence: Synthetic oligonucleotide
aaaaactaacccgataaaacg

SEQ ID NO: 13064 - DNA, 22 bp, Artificial Sequence
  Description of Artificial Sequence: Synthetic oligonucleotide
ttgatcgttgagtagtagcgag

SEQ ID NO: 13065 - DNA, 21 bp, Artificial Sequence
  Description of Artificial Sequence: Synthetic oligonucleotide
ttagatacgagagcgcgttag

SEQ ID NO: 13066 - DNA, 19 bp, Artificial Sequence
  Description of Artificial Sequence: Synthetic oligonucleotide
cgtggacgttgtaatagga

SEQ ID NO: 13067 - DNA, 19 bp, Artificial Sequence
  Description of Artificial Sequence: Synthetic oligonucleotide
tcgtggacgttgtaatagg

SEQ ID NO: 13068 - DNA, 24 bp, Artificial Sequence
  Description of Artificial Sequence: Synthetic oligonucleotide
aatcgacgacctaactaaaatatc

SEQ ID NO: 13069 - DNA, 20 bp, Artificial Sequence
  Description of Artificial Sequence: Synthetic oligonucleotide
atcgctcgctactactcaac

SEQ ID NO: 13070 - DNA, 20 bp, Artificial Sequence
  Description of Artificial Sequence: Synthetic oligonucleotide
gctcgctactactcaacgat

SEQ ID NO: 13071 - DNA, 23 bp, Artificial Sequence
  Description of Artificial Sequence: Synthetic oligonucleotide
atacgaataactacaaacccgta

SEQ ID NO: 13072 - DNA, 21 bp, Artificial Sequence
  Description of Artificial Sequence: Synthetic oligonucleotide
tttagatacgagagcgcgtta

SEQ ID NO: 13073 - DNA, 22 bp, Artificial Sequence
  Description of Artificial Sequence: Synthetic oligonucleotide
tgtaataggacggaggtttacg

SEQ ID NO: 13074 - DNA, 20 bp, Artificial Sequence
  Description of Artificial Sequence: Synthetic oligonucleotide
acaaaataaaatacgcgacc

SEQ ID NO: 13075 - DNA, 21 bp, Artificial Sequence
  Description of Artificial Sequence: Synthetic oligonucleotide
gacaaaataaaatacgcgacc

SEQ ID NO: 13076 - DNA, 23 bp, Artificial Sequence
  Description of Artificial Sequence: Synthetic oligonucleotide
tagtttaagaggaattacgagcg

SEQ ID NO: 13077 - DNA, 22 bp, Artificial Sequence
  Description of Artificial Sequence: Synthetic oligonucleotide
aatcgacgacctaactaaaata

SEQ ID NO: 13078 - DNA, 21 bp, Artificial Sequence
  Description of Artificial Sequence: Synthetic oligonucleotide
gttgagtagtagcgagcgatt

SEQ ID NO: 13079 - DNA, 21 bp, Artificial Sequence
  Description of Artificial Sequence: Synthetic oligonucleotide
ctattacaacgtccacgaaaa

SEQ ID NO: 13080 - DNA, 23 bp, Artificial Sequence
  Description of Artificial Sequence: Synthetic oligonucleotide
ttcgttttaggtttttcgacgtg

SEQ ID NO: 13081 - DNA, 19 bp, Artificial Sequence
  Description of Artificial Sequence: Synthetic oligonucleotide
gttcgttttatcgggttag

SEQ ID NO: 13082 - DNA, 20 bp, Artificial Sequence
  Description of Artificial Sequence: Synthetic oligonucleotide
gaattacgagcggaagtttt

SEQ ID NO: 13083 - DNA, 21 bp, Artificial Sequence
  Description of Artificial Sequence: Synthetic oligonucleotide
tttttatcggtttgcgtttat

SEQ ID NO: 13084 - DNA, 22 bp, Artificial Sequence
  Description of Artificial Sequence: Synthetic oligonucleotide
aaactaacccgataaaacgaac

SEQ ID NO: 13085 - DNA, 22 bp, Artificial Sequence
  Description of Artificial Sequence: Synthetic oligonucleotide
ttttagatacgagagcgcgtta

SEQ ID NO: 13086 - DNA, 23 bp, Artificial Sequence
  Description of Artificial Sequence: Synthetic oligonucleotide
atcgacgacctaactaaaatatc

SEQ ID NO: 13087 - DNA, 20 bp, Artificial Sequence
  Description of Artificial Sequence: Synthetic oligonucleotide
acgttgtaataggacggagg

SEQ ID NO: 13088 - DNA, 19 bp, Artificial Sequence
  Description of Artificial Sequence: Synthetic oligonucleotide
cgttgtaataggacggagg

SEQ ID NO: 13089 - DNA, 21 bp, Artificial Sequence
  Description of Artificial Sequence: Synthetic oligonucleotide
acgttgtaataggacggaggt

SEQ ID NO: 13090 - DNA, 21 bp, Artificial Sequence
  Description of Artificial Sequence: Synthetic oligonucleotide
aaaactaacccgataaaacga

SEQ ID NO: 13091 - DNA, 21 bp, Artificial Sequence
  Description of Artificial Sequence: Synthetic oligonucleotide
acgaaaaactaacccgataaa

SEQ ID NO: 13092 - DNA, 18 bp, Artificial Sequence
  Description of Artificial Sequence: Synthetic oligonucleotide
acgagagcgcgttagata

SEQ ID NO: 13093 - DNA, 20 bp, Artificial Sequence
  Description of Artificial Sequence: Synthetic oligonucleotide
tcgctactactcaacgatca

SEQ ID NO: 13094 - DNA, 21 bp, Artificial Sequence
  Description of Artificial Sequence: Synthetic oligonucleotide
ttcgtggagtcgtatatacgt

SEQ ID NO: 13095 - DNA, 23 bp, Artificial Sequence
  Description of Artificial Sequence: Synthetic oligonucleotide
ttttattagaggtacgttattta

SEQ ID NO: 13096 - DNA, 19 bp, Artificial Sequence
  Description of Artificial Sequence: Synthetic oligonucleotide
gttagttttcgttggcgtt

SEQ ID NO: 13097 - DNA, 22 bp, Artificial Sequence
  Description of Artificial Sequence: Synthetic oligonucleotide
cgcaactacgccttaatactac

SEQ ID NO: 13098 - DNA, 26 bp, Artificial Sequence
  Description of Artificial Sequence: Synthetic oligonucleotide
ttcgattttcggtttatgtagtacgt

SEQ ID NO: 13099 - DNA, 18 bp, Artificial Sequence
  Description of Artificial Sequence: Synthetic oligonucleotide
ggtggtttagtggtagaa

SEQ ID NO: 13100 - DNA, 19 bp, Artificial Sequence
  Description of Artificial Sequence: Synthetic oligonucleotide
tcgttgagtagtagcgagc

SEQ ID NO: 13101 - DNA, 20 bp, Artificial Sequence
  Description of Artificial Sequence: Synthetic oligonucleotide
cgttgtaataggacggaggt

SEQ ID NO: 13102 - DNA, 20 bp, Artificial Sequence
  Description of Artificial Sequence: Synthetic oligonucleotide
cgtttgttatcggtgtatgg

SEQ ID NO: 13103 - DNA, 16 bp, Artificial Sequence
  Description of Artificial Sequence: Synthetic oligonucleotide
gtttgttacgcgggag

SEQ ID NO: 13104 - DNA, 21 bp, Artificial Sequence
  Description of Artificial Sequence: Synthetic oligonucleotide
aatcgctcgctactactcaac

SEQ ID NO: 13105 - DNA, 19 bp, Artificial Sequence
  Description of Artificial Sequence: Synthetic oligonucleotide
gcggtagagaaagcgtaag

SEQ ID NO: 13106 - DNA, 16 bp, Artificial Sequence
  Description of Artificial Sequence: Synthetic oligonucleotide
gggacgagtcggtttt

SEQ ID NO: 13107 - DNA, 22 bp, Artificial Sequence
  Description of Artificial Sequence: Synthetic oligonucleotide
acgacctaactaaaatatcgac

SEQ ID NO: 13108 - DNA, 20 bp, Artificial Sequence
  Description of Artificial Sequence: Synthetic oligonucleotide
tttatcggtttgcgtttatc

SEQ ID NO: 13109 - DNA, 19 bp, Artificial Sequence
  Description of Artificial Sequence: Synthetic oligonucleotide
gaattacgagcggaagttt

SEQ ID NO: 13110 - DNA, 21 bp, Artificial Sequence
  Description of Artificial Sequence: Synthetic oligonucleotide
gattcgcgtttagtaaggttc

SEQ ID NO: 13111 - DNA, 21 bp, Artificial Sequence
  Description of Artificial Sequence: Synthetic oligonucleotide
catcttacgctttctctaccg

SEQ ID NO: 13112 - DNA, 16 bp, Artificial Sequence
  Description of Artificial Sequence: Synthetic oligonucleotide
gggcgcgggttacggt

SEQ ID NO: 13113 - DNA, 21 bp, Artificial Sequence
  Description of Artificial Sequence: Synthetic oligonucleotide
agtaaatttgtttatacgggt

SEQ ID NO: 13114 - DNA, 22 bp, Artificial Sequence
  Description of Artificial Sequence: Synthetic oligonucleotide
gtaataggacggaggtttacgg

SEQ ID NO: 13115 - DNA, 22 bp, Artificial Sequence
  Description of Artificial Sequence: Synthetic oligonucleotide
tattacaacgtccacgaaaaac

SEQ ID NO: 13116 - DNA, 19 bp, Artificial Sequence
  Description of Artificial Sequence: Synthetic oligonucleotide
tgttcgttttatcgggtta

SEQ ID NO: 13117 - DNA, 19 bp, Artificial Sequence
  Description of Artificial Sequence: Synthetic oligonucleotide
aataggacggaggtttacg

SEQ ID NO: 13118 - DNA, 18 bp, Artificial Sequence
  Description of Artificial Sequence: Synthetic oligonucleotide
tacggtaggcggtgatta

SEQ ID NO: 13119 - DNA, 22 bp, Artificial Sequence
  Description of Artificial Sequence: Synthetic oligonucleotide
ctacataaaccgaaaatcgaac

SEQ ID NO: 13120 - DNA, 16 bp, Artificial Sequence
  Description of Artificial Sequence: Synthetic oligonucleotide
ttcgtttgttacgcgg

SEQ ID NO: 13121 - DNA, 22 bp, Artificial Sequence
  Description of Artificial Sequence: Synthetic oligonucleotide
atatacgactccacgaacgaat

SEQ ID NO: 13122 - DNA, 20 bp, Artificial Sequence
  Description of Artificial Sequence: Synthetic oligonucleotide
atcttacgctttctctaccg

SEQ ID NO: 13123 - DNA, 21 bp, Artificial Sequence
  Description of Artificial Sequence: Synthetic oligonucleotide
tacaacgtccacgaaaaacta

SEQ ID NO: 13124 - DNA, 19 bp, Artificial Sequence
  Description of Artificial Sequence: Synthetic oligonucleotide
taagaggaattacgagcgg

SEQ ID NO: 13125 - DNA, 23 bp, Artificial Sequence
  Description of Artificial Sequence: Synthetic oligonucleotide
aaacgcgctaaatataactaaaa

SEQ ID NO: 13126 - DNA, 23 bp, Artificial Sequence
  Description of Artificial Sequence: Synthetic oligonucleotide
aaaacgcgctaaatataactaaa

SEQ ID NO: 13127 - DNA, 22 bp, Artificial Sequence
  Description of Artificial Sequence: Synthetic oligonucleotide
cgaaaaactaacccgataaaac

SEQ ID NO: 13128 - DNA, 22 bp, Artificial Sequence
  Description of Artificial Sequence: Synthetic oligonucleotide
gaaaaactaacccgataaaacg

SEQ ID NO: 13129 - DNA, 21 bp, Artificial Sequence
  Description of Artificial Sequence: Synthetic oligonucleotide
taataggacggaggtttacgg

SEQ ID NO: 13130 - DNA, 22 bp, Artificial Sequence
  Description of Artificial Sequence: Synthetic oligonucleotide
cgcgctaaatataactaaaacg

SEQ ID NO: 13131 - DNA, 19 bp, Artificial Sequence
  Description of Artificial Sequence: Synthetic oligonucleotide
aattacgagcggaagtttt

SEQ ID NO: 13132 - DNA, 20 bp, Artificial Sequence
  Description of Artificial Sequence: Synthetic oligonucleotide
ttagttatgttagcggcgac

SEQ ID NO: 13133 - DNA, 21 bp, Artificial Sequence
  Description of Artificial Sequence: Synthetic oligonucleotide
aaactacgacctaaacgcaac

SEQ ID NO: 13134 - DNA, 16 bp, Artificial Sequence
  Description of Artificial Sequence: Synthetic oligonucleotide
ttcggcgcgtcgttag

SEQ ID NO: 13135 - DNA, 17 bp, Artificial Sequence
  Description of Artificial Sequence: Synthetic oligonucleotide
atggtcgagcggtttaa

SEQ ID NO: 13136 - DNA, 19 bp, Artificial Sequence
  Description of Artificial Sequence: Synthetic oligonucleotide
ttcgttttatcgggttagt

SEQ ID NO: 13137 - DNA, 20 bp, Artificial Sequence
  Description of Artificial Sequence: Synthetic oligonucleotide
aaaactacgacctaaacgca

SEQ ID NO: 13138 - DNA, 19 bp, Artificial Sequence
  Description of Artificial Sequence: Synthetic oligonucleotide
tagttatgttagcggcgac

SEQ ID NO: 13139 - DNA, 23 bp, Artificial Sequence
  Description of Artificial Sequence: Synthetic oligonucleotide
cgacttatcaaaaataaaattcg

SEQ ID NO: 13140 - DNA, 19 bp, Artificial Sequence
  Description of Artificial Sequence: Synthetic oligonucleotide
ggcgttgcgtttaggtcgt

SEQ ID NO: 13141 - DNA, 16 bp, Artificial Sequence
  Description of Artificial Sequence: Synthetic oligonucleotide
ggcgcgtcgttaggat

SEQ ID NO: 13142 - DNA, 20 bp, Artificial Sequence
  Description of Artificial Sequence: Synthetic oligonucleotide
gaatcgctcgctactactca

SEQ ID NO: 13143 - DNA, 20 bp, Artificial Sequence
  Description of Artificial Sequence: Synthetic oligonucleotide
ctccgtcctattacaacgtc

SEQ ID NO: 13144 - DNA, 22 bp, Artificial Sequence
  Description of Artificial Sequence: Synthetic oligonucleotide
ttttgatcgttgagtagtagcg

SEQ ID NO: 13145 - DNA, 20 bp, Artificial Sequence
  Description of Artificial Sequence: Synthetic oligonucleotide
aactacgacctaaacgcaac

SEQ ID NO: 13146 - DNA, 20 bp, Artificial Sequence
  Description of Artificial Sequence: Synthetic oligonucleotide
gatcgttgagtagtagcgag

SEQ ID NO: 13147 - DNA, 19 bp, Artificial Sequence
  Description of Artificial Sequence: Synthetic oligonucleotide
ttagttttcgttggcgttt

SEQ ID NO: 13148 - DNA, 22 bp, Artificial Sequence
  Description of Artificial Sequence: Synthetic oligonucleotide
ctaaatctataccgaaaatccg

SEQ ID NO: 13149 - DNA, 20 bp, Artificial Sequence
  Description of Artificial Sequence: Synthetic oligonucleotide
gtcgtttagggtcgagagat

SEQ ID NO: 13150 - DNA, 19 bp, Artificial Sequence
  Description of Artificial Sequence: Synthetic oligonucleotide
ttcgcgttcgaatgttcgt

SEQ ID NO: 13151 - DNA, 17 bp, Artificial Sequence
  Description of Artificial Sequence: Synthetic oligonucleotide
ggtttttaggggaagga

SEQ ID NO: 13152 - DNA, 20 bp, Artificial Sequence
  Description of Artificial Sequence: Synthetic oligonucleotide
gcaaaataaaacgaatcgac

SEQ ID NO: 13153 - DNA, 22 bp, Artificial Sequence
  Description of Artificial Sequence: Synthetic oligonucleotide
tattgtagcgtttacgagaggt

SEQ ID NO: 13154 - DNA, 17 bp, Artificial Sequence
  Description of Artificial Sequence: Synthetic oligonucleotide
tttgaggtggggtgtgg

SEQ ID NO: 13155 - DNA, 17 bp, Artificial Sequence
  Description of Artificial Sequence: Synthetic oligonucleotide
gtagaaggggaggtttt

SEQ ID NO: 13156 - DNA, 20 bp, Artificial Sequence
  Description of Artificial Sequence: Synthetic oligonucleotide
caaaataaaacgaatcgacc

SEQ ID NO: 13157 - DNA, 21 bp, Artificial Sequence
  Description of Artificial Sequence: Synthetic oligonucleotide
tattgtagcgtttacgagagg

SEQ ID NO: 13158 - DNA, 19 bp, Artificial Sequence
  Description of Artificial Sequence: Synthetic oligonucleotide
tcgtttagggtcgagagat

SEQ ID NO: 13159 - DNA, 22 bp, Artificial Sequence
  Description of Artificial Sequence: Synthetic oligonucleotide
taaacgctacaataaaacgaaa

SEQ ID NO: 13160 - DNA, 21 bp, Artificial Sequence
  Description of Artificial Sequence: Synthetic oligonucleotide
ttaacggaagttggtatagcg

SEQ ID NO: 13161 - DNA, 19 bp, Artificial Sequence
  Description of Artificial Sequence: Synthetic oligonucleotide
attcgttattagtcgtcgt

SEQ ID NO: 13162 - DNA, 19 bp, Artificial Sequence
  Description of Artificial Sequence: Synthetic oligonucleotide
attggttatcgtttgtcgt

SEQ ID NO: 13163 - DNA, 22 bp, Artificial Sequence
  Description of Artificial Sequence: Synthetic oligonucleotide
ttattgtagcgtttacgagagg

SEQ ID NO: 13164 - DNA, 22 bp, Artificial Sequence
  Description of Artificial Sequence: Synthetic oligonucleotide
aacgctacaataaaacgaaaac

SEQ ID NO: 13165 - DNA, 19 bp, Artificial Sequence
  Description of Artificial Sequence: Synthetic oligonucleotide
cgtttagggtcgagagatt

SEQ ID NO: 13166 - DNA, 21 bp, Artificial Sequence
  Description of Artificial Sequence: Synthetic oligonucleotide
attgtagcgtttacgagaggt

SEQ ID NO: 13167 - DNA, 22 bp, Artificial Sequence
  Description of Artificial Sequence: Synthetic oligonucleotide
gtaaacgctacaataaaacgaa

SEQ ID NO: 13168 - DNA, 21 bp, Artificial Sequence
  Description of Artificial Sequence: Synthetic oligonucleotide
aacgctacaataaaacgaaaa

SEQ ID NO: 13169 - DNA, 20 bp, Artificial Sequence
  Description of Artificial Sequence: Synthetic oligonucleotide
taacggaagttggtatagcg

SEQ ID NO: 13170 - DNA, 21 bp, Artificial Sequence
  Description of Artificial Sequence: Synthetic oligonucleotide
aaacgctacaataaaacgaaa

SEQ ID NO: 13171 - DNA, 22 bp, Artificial Sequence
  Description of Artificial Sequence: Synthetic oligonucleotide
aaacgctacaataaaacgaaaa

SEQ ID NO: 13172 - DNA, 21 bp, Artificial Sequence
  Description of Artificial Sequence: Synthetic oligonucleotide
cgtaaacgctacaataaaacg

SEQ ID NO: 13173 - DNA, 22 bp, Artificial Sequence
  Description of Artificial Sequence: Synthetic oligonucleotide
ctcgtaaacgctacaataaaac

SEQ ID NO: 13174 - DNA, 18 bp, Artificial Sequence
  Description of Artificial Sequence: Synthetic oligonucleotide
acgaatcgacctctctcc

SEQ ID NO: 13175 - DNA, 22 bp, Artificial Sequence
  Description of Artificial Sequence: Synthetic oligonucleotide
tttcgttttattgtagcgttta

SEQ ID NO: 13176 - DNA, 22 bp, Artificial Sequence
  Description of Artificial Sequence: Synthetic oligonucleotide
attgtagcgtttacgagaggtt

SEQ ID NO: 13177 - DNA, 20 bp, Artificial Sequence
  Description of Artificial Sequence: Synthetic oligonucleotide
tgtagcgtttacgagaggtt

SEQ ID NO: 13178 - DNA, 20 bp, Artificial Sequence
  Description of Artificial Sequence: Synthetic oligonucleotide
gtagcgtttacgagaggttg

SEQ ID NO: 13179 - DNA, 20 bp, Artificial Sequence
  Description of Artificial Sequence: Synthetic oligonucleotide
ttgtagcgtttacgagaggt

SEQ ID NO: 13180 - DNA, 19 bp, Artificial Sequence
  Description of Artificial Sequence: Synthetic oligonucleotide
tttttgtcgtttagggtcg

SEQ ID NO: 13181 - DNA, 18 bp, Artificial Sequence
  Description of Artificial Sequence: Synthetic oligonucleotide
ttttgtcgtttagggtcg

SEQ ID NO: 13182 - DNA, 19 bp, Artificial Sequence
  Description of Artificial Sequence: Synthetic oligonucleotide
tgtcgtttagggtcgagag

SEQ ID NO: 13183 - DNA, 22 bp, Artificial Sequence
  Description of Artificial Sequence: Synthetic oligonucleotide
gttttcgttttattgtagcgtt

SEQ ID NO: 13184 - DNA, 21 bp, Artificial Sequence
  Description of Artificial Sequence: Synthetic oligonucleotide
acgctacaataaaacgaaaac

SEQ ID NO: 13185 - DNA, 22 bp, Artificial Sequence
  Description of Artificial Sequence: Synthetic oligonucleotide
aaccgataacgtaaatcaaaac

SEQ ID NO: 13186 - DNA, 18 bp, Artificial Sequence
  Description of Artificial Sequence: Synthetic oligonucleotide
ggaacgggtttcgtagtc

SEQ ID NO: 13187 - DNA, 19 bp, Artificial Sequence
  Description of Artificial Sequence: Synthetic oligonucleotide
aggttcgtgggcgtttcgt

SEQ ID NO: 13188 - DNA, 17 bp, Artificial Sequence
  Description of Artificial Sequence: Synthetic oligonucleotide
gtgcggtttagaaacgt

SEQ ID NO: 13189 - DNA, 22 bp, Artificial Sequence
  Description of Artificial Sequence: Synthetic oligonucleotide
ttcgttttattgtagcgtttac

SEQ ID NO: 13190 - DNA, 21 bp, Artificial Sequence
  Description of Artificial Sequence: Synthetic oligonucleotide
ttgtagcgtttacgagaggtt

SEQ ID NO: 13191 - DNA, 19 bp, Artificial Sequence
  Description of Artificial Sequence: Synthetic oligonucleotide
aaaaacgacctcgctactc

SEQ ID NO: 13192 - DNA, 22 bp, Artificial Sequence
  Description of Artificial Sequence: Synthetic oligonucleotide
cgattcgagttggtagtaaaat

SEQ ID NO: 13193 - DNA, 16 bp, Artificial Sequence
  Description of Artificial Sequence: Synthetic oligonucleotide
ttcgttttcgagcggg

SEQ ID NO: 13194 - DNA, 18 bp, Artificial Sequence
  Description of Artificial Sequence: Synthetic oligonucleotide
atcgtcggggggaggggt

SEQ ID NO: 13195 - DNA, 19 bp, Artificial Sequence
  Description of Artificial Sequence: Synthetic oligonucleotide
aaacgacctcgctactcac

SEQ ID NO: 13196 - DNA, 19 bp, Artificial Sequence
  Description of Artificial Sequence: Synthetic oligonucleotide
cgacctcgctactcactaa

SEQ ID NO: 13197 - DNA, 19 bp, Artificial Sequence
  Description of Artificial Sequence: Synthetic oligonucleotide
aacgacctcgctactcact

SEQ ID NO: 13198 - DNA, 21 bp, Artificial Sequence
  Description of Artificial Sequence: Synthetic oligonucleotide
cgattcgagttggtagtaaaa

SEQ ID NO: 13199 - DNA, 19 bp, Artificial Sequence
  Description of Artificial Sequence: Synthetic oligonucleotide
aaaacgacctcgctactca

SEQ ID NO: 13200 - DNA, 21 bp, Artificial Sequence
  Description of Artificial Sequence: Synthetic oligonucleotide
aattctatcaccgaacgatct

SEQ ID NO: 13201 - DNA, 22 bp, Artificial Sequence
  Description of Artificial Sequence: Synthetic oligonucleotide
tcgtatttattatatttcggat

SEQ ID NO: 13202 - DNA, 19 bp, Artificial Sequence
  Description of Artificial Sequence: Synthetic oligonucleotide
ttcgtattcgaagaggcgg

SEQ ID NO: 13203 - DNA, 25 bp, Artificial Sequence
  Description of Artificial Sequence: Synthetic oligonucleotide
gttaatattagtttttatacgaatt

SEQ ID NO: 13204 - DNA, 22 bp, Artificial Sequence
  Description of Artificial Sequence: Synthetic oligonucleotide
taaacaattctatcaccgaacg

SEQ ID NO: 13205 - DNA, 23 bp, Artificial Sequence
  Description of Artificial Sequence: Synthetic oligonucleotide
gtttttatacgaattagaaaaga

SEQ ID NO: 13206 - DNA, 20 bp, Artificial Sequence
  Description of Artificial Sequence: Synthetic oligonucleotide
aacaattctatcaccgaacg

SEQ ID NO: 13207 - DNA, 22 bp, Artificial Sequence
  Description of Artificial Sequence: Synthetic oligonucleotide
gtttttattagttcggttgtcg

SEQ ID NO: 13208 - DNA, 22 bp, Artificial Sequence
  Description of Artificial Sequence: Synthetic oligonucleotide
tcttattctctaaacacgacgc

SEQ ID NO: 13209 - DNA, 16 bp, Artificial Sequence
  Description of Artificial Sequence: Synthetic oligonucleotide
agtttcgcgcgttggg

SEQ ID NO: 13210 - DNA, 16 bp, Artificial Sequence
  Description of Artificial Sequence: Synthetic oligonucleotide
attgggcggggagtat

SEQ ID NO: 13211 - DNA, 21 bp, Artificial Sequence
  Description of Artificial Sequence: Synthetic oligonucleotide
cttattctctaaacacgacgc

SEQ ID NO: 13212 - DNA, 21 bp, Artificial Sequence
  Description of Artificial Sequence: Synthetic oligonucleotide
tttttattagttcggttgtcg

SEQ ID NO: 13213 - DNA, 22 bp, Artificial Sequence
  Description of Artificial Sequence: Synthetic oligonucleotide
agtataggcgtcgtgtttagag

SEQ ID NO: 13214 - DNA, 21 bp, Artificial Sequence
  Description of Artificial Sequence: Synthetic oligonucleotide
tatatctttaactcgctcccg

SEQ ID NO: 13215 - DNA, 17 bp, Artificial Sequence
  Description of Artificial Sequence: Synthetic oligonucleotide
ataggcgcgggaggcgg

SEQ ID NO: 13216 - DNA, 17 bp, Artificial Sequence
  Description of Artificial Sequence: Synthetic oligonucleotide
gaggagtagttaggtag

SEQ ID NO: 13217 - DNA, 22 bp, Artificial Sequence
  Description of Artificial Sequence: Synthetic oligonucleotide
ctatatctttaactcgctcccg

SEQ ID NO: 13218 - DNA, 16 bp, Artificial Sequence
  Description of Artificial Sequence: Synthetic oligonucleotide
ttaggtagcgacgcga

SEQ ID NO: 13219 - DNA, 16 bp, Artificial Sequence
  Description of Artificial Sequence: Synthetic oligonucleotide
agagataggcgcggga

SEQ ID NO: 13220 - DNA, 22 bp, Artificial Sequence
  Description of Artificial Sequence: Synthetic oligonucleotide
attctctaaacacgacgcctat

SEQ ID NO: 13221 - DNA, 16 bp, Artificial Sequence
  Description of Artificial Sequence: Synthetic oligonucleotide
taaattgggcggggag

SEQ ID NO: 13222 - DNA, 20 bp, Artificial Sequence
  Description of Artificial Sequence: Synthetic oligonucleotide
tctctaaacacgacgcctat

SEQ ID NO: 13223 - DNA, 17 bp, Artificial Sequence
  Description of Artificial Sequence: Synthetic oligonucleotide
ttttaaattgggcgggg

SEQ ID NO: 13224 - DNA, 21 bp, Artificial Sequence
  Description of Artificial Sequence: Synthetic oligonucleotide
ttctctaaacacgacgcctat

SEQ ID NO: 13225 - DNA, 21 bp, Artificial Sequence
  Description of Artificial Sequence: Synthetic oligonucleotide
tattctctaaacacgacgcct

SEQ ID NO: 13226 - DNA, 22 bp, Artificial Sequence
  Description of Artificial Sequence: Synthetic oligonucleotide
gagtataggcgtcgtgtttaga

SEQ ID NO: 13227 - DNA, 20 bp, Artificial Sequence
  Description of Artificial Sequence: Synthetic oligonucleotide
atatctttaactcgctcccg

SEQ ID NO: 13228 - DNA, 22 bp, Artificial Sequence
  Description of Artificial Sequence: Synthetic oligonucleotide
cgtttttattagttcggttgtc

SEQ ID NO: 13229 - DNA, 22 bp, Artificial Sequence
  Description of Artificial Sequence: Synthetic oligonucleotide
cgcgcctatctcttattctcta

SEQ ID NO: 13230 - DNA, 18 bp, Artificial Sequence
  Description of Artificial Sequence: Synthetic oligonucleotide
ggcggggagtataggcgt

SEQ ID NO: 13231 - DNA, 20 bp, Artificial Sequence
  Description of Artificial Sequence: Synthetic oligonucleotide
tttattagttcggttgtcgg

SEQ ID NO: 13232 - DNA, 22 bp, Artificial Sequence
  Description of Artificial Sequence: Synthetic oligonucleotide
tctaaacacgacgcctatactc

SEQ ID NO: 13233 - DNA, 22 bp, Artificial Sequence
  Description of Artificial Sequence: Synthetic oligonucleotide
tctctaaacacgacgcctatac

SEQ ID NO: 13234 - DNA, 22 bp, Artificial Sequence
  Description of Artificial Sequence: Synthetic oligonucleotide
ttattctctaaacacgacgcct

SEQ ID NO: 13235 - DNA, 21 bp, Artificial Sequence
  Description of Artificial Sequence: Synthetic oligonucleotide
gtataggcgtcgtgtttagag

SEQ ID NO: 13236 - DNA, 16 bp, Artificial Sequence
  Description of Artificial Sequence: Synthetic oligonucleotide
taggtagcgacgcgag

SEQ ID NO: 13237 - DNA, 21 bp, Artificial Sequence
  Description of Artificial Sequence: Synthetic oligonucleotide
ctaaacacgacgcctatactc

SEQ ID NO: 13238 - DNA, 19 bp, Artificial Sequence
  Description of Artificial Sequence: Synthetic oligonucleotide
taattttaaattgggcggg

SEQ ID NO: 13239 - DNA, 21 bp, Artificial Sequence
  Description of Artificial Sequence: Synthetic oligonucleotide
ctctaaacacgacgcctatac

SEQ ID NO: 13240 - DNA, 22 bp, Artificial Sequence
  Description of Artificial Sequence: Synthetic oligonucleotide
tataggcgtcgtgtttagagaa

SEQ ID NO: 13241 - DNA, 23 bp, Artificial Sequence
  Description of Artificial Sequence: Synthetic oligonucleotide
ctcttattctctaaacacgacgc

SEQ ID NO: 13242 - DNA, 22 bp, Artificial Sequence
  Description of Artificial Sequence: Synthetic oligonucleotide
ctaaacacgacgcctatactcc

SEQ ID NO: 13243 - DNA, 20 bp, Artificial Sequence
  Description of Artificial Sequence: Synthetic oligonucleotide
tttaattttaaattgggcgg

SEQ ID NO: 13244 - DNA, 19 bp, Artificial Sequence
  Description of Artificial Sequence: Synthetic oligonucleotide
tatctttaactcgctcccg

SEQ ID NO: 13245 - DNA, 21 bp, Artificial Sequence
  Description of Artificial Sequence: Synthetic oligonucleotide
ttttattagttcggttgtcgg

SEQ ID NO: 13246 - DNA, 22 bp, Artificial Sequence
  Description of Artificial Sequence: Synthetic oligonucleotide
tattctctaaacacgacgccta

SEQ ID NO: 13247 - DNA, 22 bp, Artificial Sequence
  Description of Artificial Sequence: Synthetic oligonucleotide
tttttattagttcggttgtcgg

SEQ ID NO: 13248 - DNA, 22 bp, Artificial Sequence
  Description of Artificial Sequence: Synthetic oligonucleotide
gcgtcgtgtttagagaataaga

SEQ ID NO: 13249 - DNA, 23 bp, Artificial Sequence
  Description of Artificial Sequence: Synthetic oligonucleotide
actatatctttaactcgctcccg

SEQ ID NO: 13250 - DNA, 21 bp, Artificial Sequence
  Description of Artificial Sequence: Synthetic oligonucleotide
ttttcgcgtttttattagttc

SEQ ID NO: 13251 - DNA, 19 bp, Artificial Sequence
  Description of Artificial Sequence: Synthetic oligonucleotide
aacacgacgcctatactcc

SEQ ID NO: 13252 - DNA, 16 bp, Artificial Sequence
  Description of Artificial Sequence: Synthetic oligonucleotide
ttcgcgcgttgggtag

SEQ ID NO: 13253 - DNA, 19 bp, Artificial Sequence
  Description of Artificial Sequence: Synthetic oligonucleotide
gttgtcggggtatagttat

SEQ ID NO: 13254 - DNA, 21 bp, Artificial Sequence
  Description of Artificial Sequence: Synthetic oligonucleotide
ataggcgtcgtgtttagagaa

SEQ ID NO: 13255 - DNA, 18 bp, Artificial Sequence
  Description of Artificial Sequence: Synthetic oligonucleotide
atctttaactcgctcccg

SEQ ID NO: 13256 - DNA, 22 bp, Artificial Sequence
  Description of Artificial Sequence: Synthetic oligonucleotide
ggagtataggcgtcgtgtttag

SEQ ID NO: 13257 - DNA, 18 bp, Artificial Sequence
  Description of Artificial Sequence: Synthetic oligonucleotide
ccgcgcctatctcttatt

SEQ ID NO: 13258 - DNA, 19 bp, Artificial Sequence
  Description of Artificial Sequence: Synthetic oligonucleotide
ggtttacggcggatagaat

SEQ ID NO: 13259 - DNA, 22 bp, Artificial Sequence
  Description of Artificial Sequence: Synthetic oligonucleotide
cgacaaccgaactaataaaaac

SEQ ID NO: 13260 - DNA, 17 bp, Artificial Sequence
  Description of Artificial Sequence: Synthetic oligonucleotide
ttcgagcgtattacggg

SEQ ID NO: 13261 - DNA, 18 bp, Artificial Sequence
  Description of Artificial Sequence: Synthetic oligonucleotide
gtagggggtttataggta

SEQ ID NO: 13262 - DNA, 22 bp, Artificial Sequence
  Description of Artificial Sequence: Synthetic oligonucleotide
gacaaccgaactaataaaaacg

SEQ ID NO: 13263 - DNA, 21 bp, Artificial Sequence
  Description of Artificial Sequence: Synthetic oligonucleotide
taaacacgacgcctatactcc

SEQ ID NO: 13264 - DNA, 22 bp, Artificial Sequence
  Description of Artificial Sequence: Synthetic oligonucleotide
gcgtttttattagttcggttgt

SEQ ID NO: 13265 - DNA, 18 bp, Artificial Sequence
  Description of Artificial Sequence: Synthetic oligonucleotide
ttagtttcggtttttcgc

SEQ ID NO: 13266 - DNA, 22 bp, Artificial Sequence
  Description of Artificial Sequence: Synthetic oligonucleotide
ctctaaacacgacgcctatact

SEQ ID NO: 13267 - DNA, 21 bp, Artificial Sequence
  Description of Artificial Sequence: Synthetic oligonucleotide
ttattctctaaacacgacgcc

SEQ ID NO: 13268 - DNA, 19 bp, Artificial Sequence
  Description of Artificial Sequence: Synthetic oligonucleotide
ttattagttcggttgtcgg

SEQ ID NO: 13269 - DNA, 22 bp, Artificial Sequence
  Description of Artificial Sequence: Synthetic oligonucleotide
cgggagcgagttaaagatatag

SEQ ID NO: 13270 - DNA, 19 bp, Artificial Sequence
  Description of Artificial Sequence: Synthetic oligonucleotide
accgataacgaaaaacgac

SEQ ID NO: 13271 - DNA, 17 bp, Artificial Sequence
  Description of Artificial Sequence: Synthetic oligonucleotide
ttcgaggcgtcgtacgt

SEQ ID NO: 13272 - DNA, 24 bp, Artificial Sequence
  Description of Artificial Sequence: Synthetic oligonucleotide
gtcgtttcgcgaagttatattcgt

SEQ ID NO: 13273 - DNA, 20 bp, Artificial Sequence
  Description of Artificial Sequence: Synthetic oligonucleotide
taggcgtcgtgtttagagaa

SEQ ID NO: 13274 - DNA, 19 bp, Artificial Sequence
  Description of Artificial Sequence: Synthetic oligonucleotide
tattagttcggttgtcggg

SEQ ID NO: 13275 - DNA, 17 bp, Artificial Sequence
  Description of Artificial Sequence: Synthetic oligonucleotide
tctttaactcgctcccg

SEQ ID NO: 13276 - DNA, 19 bp, Artificial Sequence
  Description of Artificial Sequence: Synthetic oligonucleotide
ctctaaacacgacgcctat

SEQ ID NO: 13277 - DNA, 19 bp, Artificial Sequence
  Description of Artificial Sequence: Synthetic oligonucleotide
cgcgttgggtagttttatt

SEQ ID NO: 13278 - DNA, 21 bp, Artificial Sequence
  Description of Artificial Sequence: Synthetic oligonucleotide
gtgtttagagaataagagata

SEQ ID NO: 13279 - DNA, 22 bp, Artificial Sequence
  Description of Artificial Sequence: Synthetic oligonucleotide
ataggcgtcgtgtttagagaat

SEQ ID NO: 13280 - DNA, 20 bp, Artificial Sequence
  Description of Artificial Sequence: Synthetic oligonucleotide
ttcgcgtttttattagttcg

SEQ ID NO: 13281 - DNA, 22 bp, Artificial Sequence
  Description of Artificial Sequence: Synthetic oligonucleotide
tatctaaaccgatctatcaccg

SEQ ID NO: 13282 - DNA, 22 bp, Artificial Sequence
  Description of Artificial Sequence: Synthetic oligonucleotide
tttttatttcgtaggtatcgtt

SEQ ID NO: 13283 - DNA, 16 bp, Artificial Sequence
  Description of Artificial Sequence: Synthetic oligonucleotide
gtcgtgaatcgtgcgg

SEQ ID NO: 13284 - DNA, 21 bp, Artificial Sequence
  Description of Artificial Sequence: Synthetic oligonucleotide
atttgggtagggttttcgcgt

SEQ ID NO: 13285 - DNA, 23 bp, Artificial Sequence
  Description of Artificial Sequence: Synthetic oligonucleotide
atttttatttcgtaggtatcgtt

SEQ ID NO: 13286 - DNA, 21 bp, Artificial Sequence
  Description of Artificial Sequence: Synthetic oligonucleotide
atctaaaccgatctatcaccg

SEQ ID NO: 13287-13640 - skipped (354 entries)

SEQ ID NO: 13641 - DNA, 22 bp, Artificial Sequence
  Description of Artificial Sequence: Synthetic oligonucleotide
tataccccactacgaaatacga

SEQ ID NO: 13642 - DNA, 22 bp, Artificial Sequence
  Description of Artificial Sequence: Synthetic oligonucleotide
tagttatatgtcggttacgtgc

SEQ ID NO: 13643 - DNA, 16 bp, Artificial Sequence
  Description of Artificial Sequence: Synthetic oligonucleotide
atcggcgggttttcga

SEQ ID NO: 13644 - DNA, 24 bp, Artificial Sequence
  Description of Artificial Sequence: Synthetic oligonucleotide
agcgttttggttcgtatttagcgg

SEQ ID NO: 13645 - DNA, 20 bp, Artificial Sequence
  Description of Artificial Sequence: Synthetic oligonucleotide
gaaatacgaatcgaaaaacg

SEQ ID NO: 13646 - DNA, 21 bp, Artificial Sequence
  Description of Artificial Sequence: Synthetic oligonucleotide
ataccccactacgaaatacga

SEQ ID NO: 13647 - DNA, 23 bp, Artificial Sequence
  Description of Artificial Sequence: Synthetic oligonucleotide
atagttatatgtcggttacgtgc

SEQ ID NO: 13648 - DNA, 21 bp, Artificial Sequence
  Description of Artificial Sequence: Synthetic oligonucleotide
agttatatgtcggttacgtgc

SEQ ID NO: 13649 - DNA, 20 bp, Artificial Sequence
  Description of Artificial Sequence: Synthetic oligonucleotide
taccccactacgaaatacga

SEQ ID NO: 13650 - DNA, 22 bp, Artificial Sequence
  Description of Artificial Sequence: Synthetic oligonucleotide
ataatccgctaaatacgaacca

SEQ ID NO: 13651 - DNA, 16 bp, Artificial Sequence
  Description of Artificial Sequence: Synthetic oligonucleotide
gggaatggggagcgtt

SEQ ID NO: 13652 - DNA, 23 bp, Artificial Sequence
  Description of Artificial Sequence: Synthetic oligonucleotide
ctataccccactacgaaatacga

SEQ ID NO: 13653 - DNA, 21 bp, Artificial Sequence
  Description of Artificial Sequence: Synthetic oligonucleotide
taatccgctaaatacgaacca

SEQ ID NO: 13654 - DNA, 19 bp, Artificial Sequence
  Description of Artificial Sequence: Synthetic oligonucleotide
accccactacgaaatacga

SEQ ID NO: 13655 - DNA, 22 bp, Artificial Sequence
  Description of Artificial Sequence: Synthetic oligonucleotide
tataatccgctaaatacgaacc

SEQ ID NO: 13656 - DNA, 19 bp, Artificial Sequence
  Description of Artificial Sequence: Synthetic oligonucleotide
tatatgtcggttacgtgcg

SEQ ID NO: 13657 - DNA, 16 bp, Artificial Sequence
  Description of Artificial Sequence: Synthetic oligonucleotide
ggaatggggagcgttt

SEQ ID NO: 13658 - DNA, 19 bp, Artificial Sequence
  Description of Artificial Sequence: Synthetic oligonucleotide
atccgctaaatacgaacca

SEQ ID NO: 13659 - DNA, 23 bp, Artificial Sequence
  Description of Artificial Sequence: Synthetic oligonucleotide
tataatccgctaaatacgaacca

SEQ ID NO: 13660 - DNA, 22 bp, Artificial Sequence
  Description of Artificial Sequence: Synthetic oligonucleotide
ctaaaaactctacctcgtaccg

SEQ ID NO: 13661 - DNA, 20 bp, Artificial Sequence
  Description of Artificial Sequence: Synthetic oligonucleotide
tagggtcgatttagtcggag

SEQ ID NO: 13662 - DNA, 20 bp, Artificial Sequence
  Description of Artificial Sequence: Synthetic oligonucleotide
ttcgcgttgagtatttcgta

SEQ ID NO: 13663 - DNA, 18 bp, Artificial Sequence
  Description of Artificial Sequence: Synthetic oligonucleotide
atcgatttgcgttaggtt

SEQ ID NO: 13664 - DNA, 22 bp, Artificial Sequence
  Description of Artificial Sequence: Synthetic oligonucleotide
ttttcggttagtttcgtatttt

SEQ ID NO: 13665 - DNA, 21 bp, Artificial Sequence
  Description of Artificial Sequence: Synthetic oligonucleotide
aaaattcactacaacgctacg

SEQ ID NO: 13666 - DNA, 19 bp, Artificial Sequence
  Description of Artificial Sequence: Synthetic oligonucleotide
ttcgtttgggtaacgtcga

SEQ ID NO: 13667 - DNA, 20 bp, Artificial Sequence
  Description of Artificial Sequence: Synthetic oligonucleotide
ttttcgggttattacgtttt

SEQ ID NO: 13668 - DNA, 22 bp, Artificial Sequence
  Description of Artificial Sequence: Synthetic oligonucleotide
aaaaattcactacaacgctacg

SEQ ID NO: 13669 - DNA, 22 bp, Artificial Sequence
  Description of Artificial Sequence: Synthetic oligonucleotide
gattttcggttagtttcgtatt

SEQ ID NO: 13670 - DNA, 22 bp, Artificial Sequence
  Description of Artificial Sequence: Synthetic oligonucleotide
ttaagattttcggttagtttcg

SEQ ID NO: 13671 - DNA, 22 bp, Artificial Sequence
  Description of Artificial Sequence: Synthetic oligonucleotide
attttcggttagtttcgtattt

SEQ ID NO: 13672 - DNA, 23 bp, Artificial Sequence
  Description of Artificial Sequence: Synthetic oligonucleotide
agattttcggttagtttcgtatt

SEQ ID NO: 13673 - DNA, 22 bp, Artificial Sequence
  Description of Artificial Sequence: Synthetic oligonucleotide
taagattttcggttagtttcgt

SEQ ID NO: 13674 - DNA, 20 bp, Artificial Sequence
  Description of Artificial Sequence: Synthetic oligonucleotide
aattcactacaacgctacgc

SEQ ID NO: 13675 - DNA, 22 bp, Artificial Sequence
  Description of Artificial Sequence: Synthetic oligonucleotide
tttcggttagtttcgtattttt

SEQ ID NO: 13676 - DNA, 21 bp, Artificial Sequence
  Description of Artificial Sequence: Synthetic oligonucleotide
taagattttcggttagtttcg

SEQ ID NO: 13677 - DNA, 20 bp, Artificial Sequence
  Description of Artificial Sequence: Synthetic oligonucleotide
cgtatttgaatttgtaggcg

SEQ ID NO: 13678 - DNA, 22 bp, Artificial Sequence
  Description of Artificial Sequence: Synthetic oligonucleotide
acgaaactaaccgaaaatctta

SEQ ID NO: 13679 - DNA, 16 bp, Artificial Sequence
  Description of Artificial Sequence: Synthetic oligonucleotide
taggcgtgcggacgta

SEQ ID NO: 13680 - DNA, 17 bp, Artificial Sequence
  Description of Artificial Sequence: Synthetic oligonucleotide
aggtgttgtggatagga

SEQ ID NO: 13681 - DNA, 23 bp, Artificial Sequence
  Description of Artificial Sequence: Synthetic oligonucleotide
attaagattttcggttagtttcg

SEQ ID NO: 13682 - DNA, 21 bp, Artificial Sequence
  Description of Artificial Sequence: Synthetic oligonucleotide
aaattcactacaacgctacgc

SEQ ID NO: 13683 - DNA, 22 bp, Artificial Sequence
  Description of Artificial Sequence: Synthetic oligonucleotide
agattttcggttagtttcgtat

SEQ ID NO: 13684 - DNA, 22 bp, Artificial Sequence
  Description of Artificial Sequence: Synthetic oligonucleotide
aaaattcactacaacgctacgc

SEQ ID NO: 13685 - DNA, 21 bp, Artificial Sequence
  Description of Artificial Sequence: Synthetic oligonucleotide
aagattttcggttagtttcgt

SEQ ID NO: 13686 - DNA, 22 bp, Artificial Sequence
  Description of Artificial Sequence: Synthetic oligonucleotide
atacgaaactaaccgaaaatct

SEQ ID NO: 13687 - DNA, 21 bp, Artificial Sequence
  Description of Artificial Sequence: Synthetic oligonucleotide
tcgtatttgaatttgtaggcg

SEQ ID NO: 13688 - DNA, 19 bp, Artificial Sequence
  Description of Artificial Sequence: Synthetic oligonucleotide
attcactacaacgctacgc

SEQ ID NO: 13689 - DNA, 22 bp, Artificial Sequence
  Description of Artificial Sequence: Synthetic oligonucleotide
ttcgtatttgaatttgtaggcg

SEQ ID NO: 13690 - DNA, 23 bp, Artificial Sequence
  Description of Artificial Sequence: Synthetic oligonucleotide
tacgaaactaaccgaaaatctta

SEQ ID NO: 13691 - DNA, 20 bp, Artificial Sequence
  Description of Artificial Sequence: Synthetic oligonucleotide
aagattttcggttagtttcg

SEQ ID NO: 13692 - DNA, 20 bp, Artificial Sequence
  Description of Artificial Sequence: Synthetic oligonucleotide
aaattcactacaacgctacg

SEQ ID NO: 13693 - DNA, 23 bp, Artificial Sequence
  Description of Artificial Sequence: Synthetic oligonucleotide
gattttcggttagtttcgtattt

SEQ ID NO: 13694 - DNA, 18 bp, Artificial Sequence
  Description of Artificial Sequence: Synthetic oligonucleotide
actacaacgctacgcgac

SEQ ID NO: 13695 - DNA, 21 bp, Artificial Sequence
  Description of Artificial Sequence: Synthetic oligonucleotide
cgaaactaaccgaaaatctta

SEQ ID NO: 13696 - DNA, 21 bp, Artificial Sequence
  Description of Artificial Sequence: Synthetic oligonucleotide
ttcggttagtttcgtattttt

SEQ ID NO: 13697 - DNA, 22 bp, Artificial Sequence
  Description of Artificial Sequence: Synthetic oligonucleotide
tttcgatataggtttcgagttt

SEQ ID NO: 13698 - DNA, 22 bp, Artificial Sequence
  Description of Artificial Sequence: Synthetic oligonucleotide
aaaataataaaacgctcacgac

SEQ ID NO: 13699 - DNA, 19 bp, Artificial Sequence
  Description of Artificial Sequence: Synthetic oligonucleotide
gtcgaacgcgttttttcgg

SEQ ID NO: 13700 - DNA, 17 bp, Artificial Sequence
  Description of Artificial Sequence: Synthetic oligonucleotide
ttgagttaatcggcgtg

SEQ ID NO: 13701 - DNA, 22 bp, Artificial Sequence
  Description of Artificial Sequence: Synthetic oligonucleotide
ttttcgatataggtttcgagtt

SEQ ID NO: 13702 - DNA, 22 bp, Artificial Sequence
  Description of Artificial Sequence: Synthetic oligonucleotide
ttcgatataggtttcgagtttt

SEQ ID NO: 13703 - DNA, 22 bp, Artificial Sequence
  Description of Artificial Sequence: Synthetic oligonucleotide
tttttcgatataggtttcgagt

SEQ ID NO: 13704 - DNA, 22 bp, Artificial Sequence
  Description of Artificial Sequence: Synthetic oligonucleotide
aaaaataataaaacgctcacga

SEQ ID NO: 13705 - DNA, 21 bp, Artificial Sequence
  Description of Artificial Sequence: Synthetic oligonucleotide
aaaaataataaaacgctcacg

SEQ ID NO: 13706 - DNA, 21 bp, Artificial Sequence
  Description of Artificial Sequence: Synthetic oligonucleotide
aaataataaaacgctcacgac

SEQ ID NO: 13707 - DNA, 21 bp, Artificial Sequence
  Description of Artificial Sequence: Synthetic oligonucleotide
aataataaaacgctcacgacc

SEQ ID NO: 13708 - DNA, 20 bp, Artificial Sequence
  Description of Artificial Sequence: Synthetic oligonucleotide
ataataaaacgctcacgacc

SEQ ID NO: 13709 - DNA, 20 bp, Artificial Sequence
  Description of Artificial Sequence: Synthetic oligonucleotide
cgtttttcggagttgttaat

SEQ ID NO: 13710 - DNA, 22 bp, Artificial Sequence
  Description of Artificial Sequence: Synthetic oligonucleotide
acgtaaaatcacgaactaaacc

SEQ ID NO: 13711 - DNA, 19 bp, Artificial Sequence
  Description of Artificial Sequence: Synthetic oligonucleotide
gttaacgttatcgttacgt

SEQ ID NO: 13712 - DNA, 19 bp, Artificial Sequence
  Description of Artificial Sequence: Synthetic oligonucleotide
tatataggtgagttttggg

SEQ ID NO: 13713 - DNA, 21 bp, Artificial Sequence
  Description of Artificial Sequence: Synthetic oligonucleotide
tcgtttttcggagttgttaat

SEQ ID NO: 13714 - DNA, 22 bp, Artificial Sequence
  Description of Artificial Sequence: Synthetic oligonucleotide
ttcgtttttcggagttgttaat

SEQ ID NO: 13715 - DNA, 19 bp, Artificial Sequence
  Description of Artificial Sequence: Synthetic oligonucleotide
tttcgtttttcggagttgt

SEQ ID NO: 13716 - DNA, 19 bp, Artificial Sequence
  Description of Artificial Sequence: Synthetic oligonucleotide
taataaaacgctcacgacc

SEQ ID NO: 13717 - DNA, 21 bp, Artificial Sequence
  Description of Artificial Sequence: Synthetic oligonucleotide
cgtaaaatcacgaactaaacc

SEQ ID NO: 13718 - DNA, 21 bp, Artificial Sequence
  Description of Artificial Sequence: Synthetic oligonucleotide
ataataaaacgctcacgaccc

SEQ ID NO: 13719 - DNA, 21 bp, Artificial Sequence
  Description of Artificial Sequence: Synthetic oligonucleotide
cgatataggtttcgagttttt

SEQ ID NO: 13720 - DNA, 21 bp, Artificial Sequence
  Description of Artificial Sequence: Synthetic oligonucleotide
aaaataataaaacgctcacga

SEQ ID NO: 13721 - DNA, 21 bp, Artificial Sequence
  Description of Artificial Sequence: Synthetic oligonucleotide
tcgatataggtttcgagtttt

SEQ ID NO: 13722 - DNA, 22 bp, Artificial Sequence
  Description of Artificial Sequence: Synthetic oligonucleotide
tcgatataggtttcgagttttt

SEQ ID NO: 13723 - DNA, 20 bp, Artificial Sequence
  Description of Artificial Sequence: Synthetic oligonucleotide
aaaataataaaacgctcacg

SEQ ID NO: 13724 - DNA, 22 bp, Artificial Sequence
  Description of Artificial Sequence: Synthetic oligonucleotide
aataataaaacgctcacgaccc

SEQ ID NO: 13725 - DNA, 20 bp, Artificial Sequence
  Description of Artificial Sequence: Synthetic oligonucleotide
taataaaacgctcacgaccc

SEQ ID NO: 13726 - DNA, 18 bp, Artificial Sequence
  Description of Artificial Sequence: Synthetic oligonucleotide
gtcgcgtatggagttttc

SEQ ID NO: 13727 - DNA, 18 bp, Artificial Sequence
  Description of Artificial Sequence: Synthetic oligonucleotide
ataaaacgctcacgaccc

SEQ ID NO: 13728 - DNA, 19 bp, Artificial Sequence
  Description of Artificial Sequence: Synthetic oligonucleotide
cgtttacgcggagtttagt

SEQ ID NO: 13729 - DNA, 23 bp, Artificial Sequence
  Description of Artificial Sequence: Synthetic oligonucleotide
aattaacgaacgaaaaacttcta

SEQ ID NO: 13730 - DNA, 17 bp, Artificial Sequence
  Description of Artificial Sequence: Synthetic oligonucleotide
ttcgtcggttgttacgt

SEQ ID NO: 13731 - DNA, 24 bp, Artificial Sequence
  Description of Artificial Sequence: Synthetic oligonucleotide
ttcgttgagtagtatggcgtgcga

SEQ ID NO: 13732 - DNA, 21 bp, Artificial Sequence
  Description of Artificial Sequence: Synthetic oligonucleotide
cgtatggagttttcgtttttc

SEQ ID NO: 13733 - DNA, 22 bp, Artificial Sequence
  Description of Artificial Sequence: Synthetic oligonucleotide
cgtaaaatcacgaactaaaccc

SEQ ID NO: 13734 - DNA, 18 bp, Artificial Sequence
  Description of Artificial Sequence: Synthetic oligonucleotide
aataaaacgctcacgacc

SEQ ID NO: 13735 - DNA, 20 bp, Artificial Sequence
  Description of Artificial Sequence: Synthetic oligonucleotide
cgggtttacgtgagttgtag

SEQ ID NO: 13736 - DNA, 20 bp, Artificial Sequence
  Description of Artificial Sequence: Synthetic oligonucleotide
ccgaaacgacgataaaaata

SEQ ID NO: 13737 - DNA, 17 bp, Artificial Sequence
  Description of Artificial Sequence: Synthetic oligonucleotide
gttgtcgtcgttatcgt

SEQ ID NO: 13738 - DNA, 16 bp, Artificial Sequence
  Description of Artificial Sequence: Synthetic oligonucleotide
aaacgtaggggcggtt

SEQ ID NO: 13739 - DNA, 17 bp, Artificial Sequence
  Description of Artificial Sequence: Synthetic oligonucleotide
taaaacgctcacgaccc

SEQ ID NO: 13740 - DNA, 22 bp, Artificial Sequence
  Description of Artificial Sequence: Synthetic oligonucleotide
tccgctatattctaaattcgtc

SEQ ID NO: 13741 - DNA, 22 bp, Artificial Sequence
  Description of Artificial Sequence: Synthetic oligonucleotide
atagaaatgggcgtagtagtcg

SEQ ID NO: 13742 - DNA, 16 bp, Artificial Sequence
  Description of Artificial Sequence: Synthetic oligonucleotide
ggtttcgcgtaggcgg

SEQ ID NO: 13743 - DNA, 20 bp, Artificial Sequence
  Description of Artificial Sequence: Synthetic oligonucleotide
gataagattatagagttggg

SEQ ID NO: 13744 - DNA, 21 bp, Artificial Sequence
  Description of Artificial Sequence: Synthetic oligonucleotide
tagaaatgggcgtagtagtcg

SEQ ID NO: 13745 - DNA, 22 bp, Artificial Sequence
  Description of Artificial Sequence: Synthetic oligonucleotide
tattcgaggttaaataaaaacg

SEQ ID NO: 13746 - DNA, 20 bp, Artificial Sequence
  Description of Artificial Sequence: Synthetic oligonucleotide
ccaccgactactacgaactc

SEQ ID NO: 13747 - DNA, 17 bp, Artificial Sequence
  Description of Artificial Sequence: Synthetic oligonucleotide
ttcgaggttttcggcgg

SEQ ID NO: 13748 - DNA, 18 bp, Artificial Sequence
  Description of Artificial Sequence: Synthetic oligonucleotide
agtgggtttttcgcgcgt

SEQ ID NO: 13749 - DNA, 22 bp, Artificial Sequence
  Description of Artificial Sequence: Synthetic oligonucleotide
attcgaggttaaataaaaacgg

SEQ ID NO: 13750 - DNA, 17 bp, Artificial Sequence
  Description of Artificial Sequence: Synthetic oligonucleotide
ggtttttcgcgcgtcgt

SEQ ID NO: 13751 - DNA, 21 bp, Artificial Sequence
  Description of Artificial Sequence: Synthetic oligonucleotide
ttcgaggttaaataaaaacgg

SEQ ID NO: 13752 - DNA, 20 bp, Artificial Sequence
  Description of Artificial Sequence: Synthetic oligonucleotide
cgaggttaaataaaaacgga

SEQ ID NO: 13753 - DNA, 20 bp, Artificial Sequence
  Description of Artificial Sequence: Synthetic oligonucleotide
tcgaggttaaataaaaacgg

SEQ ID NO: 13754 - DNA, 20 bp, Artificial Sequence
  Description of Artificial Sequence: Synthetic oligonucleotide
gcgttattcgggatatttag

SEQ ID NO: 13755 - DNA, 22 bp, Artificial Sequence
  Description of Artificial Sequence: Synthetic oligonucleotide
actccgtttttatttaacctcg

SEQ ID NO: 13756 - DNA, 16 bp, Artificial Sequence
  Description of Artificial Sequence: Synthetic oligonucleotide
ggcggtttttacgcga

SEQ ID NO: 13757 - DNA, 24 bp, Artificial Sequence
  Description of Artificial Sequence: Synthetic oligonucleotide
gtaaattatgataataggtagtta

SEQ ID NO: 13758 - DNA, 22 bp, Artificial Sequence
  Description of Artificial Sequence: Synthetic oligonucleotide
caaatacgaaactaccgacaac

SEQ ID NO: 13759 - DNA, 22 bp, Artificial Sequence
  Description of Artificial Sequence: Synthetic oligonucleotide
gtagcgataattttacgtggat

SEQ ID NO: 13760 - DNA, 20 bp, Artificial Sequence
  Description of Artificial Sequence: Synthetic oligonucleotide
gttgggaatggttggagtgt

SEQ ID NO: 13761 - DNA, 16 bp, Artificial Sequence
  Description of Artificial Sequence: Synthetic oligonucleotide
tggaagttttgcgcgg

SEQ ID NO: 13762 - DNA, 21 bp, Artificial Sequence
  Description of Artificial Sequence: Synthetic oligonucleotide
ctacgcaaatacgaaactacc

SEQ ID NO: 13763 - DNA, 22 bp, Artificial Sequence
  Description of Artificial Sequence: Synthetic oligonucleotide
agcgataattttacgtggatag

SEQ ID NO: 13764 - DNA, 22 bp, Artificial Sequence
  Description of Artificial Sequence: Synthetic oligonucleotide
tagcgataattttacgtggata

SEQ ID NO: 13765 - DNA, 21 bp, Artificial Sequence
  Description of Artificial Sequence: Synthetic oligonucleotide
cctacgcaaatacgaaactac

SEQ ID NO: 13766 - DNA, 21 bp, Artificial Sequence
  Description of Artificial Sequence: Synthetic oligonucleotide
caaatacgaaactaccgacaa

SEQ ID NO: 13767 - DNA, 22 bp, Artificial Sequence
  Description of Artificial Sequence: Synthetic oligonucleotide
aaggtagcgataattttacgtg

SEQ ID NO: 13768 - DNA, 20 bp, Artificial Sequence
  Description of Artificial Sequence: Synthetic oligonucleotide
gcaaatacgaaactaccgac

SEQ ID NO: 13769 - DNA, 22 bp, Artificial Sequence
  Description of Artificial Sequence: Synthetic oligonucleotide
cgataattttacgtggatagga

SEQ ID NO: 13770 - DNA, 16 bp, Artificial Sequence
  Description of Artificial Sequence: Synthetic oligonucleotide
ggaagttttgcgcgga

SEQ ID NO: 13771 - DNA, 19 bp, Artificial Sequence
  Description of Artificial Sequence: Synthetic oligonucleotide
ggataggatggaagttttg

SEQ ID NO: 13772 - DNA, 21 bp, Artificial Sequence
  Description of Artificial Sequence: Synthetic oligonucleotide
aaatacgaaactaccgacaac

SEQ ID NO: 13773 - DNA, 20 bp, Artificial Sequence
  Description of Artificial Sequence: Synthetic oligonucleotide
atacgaaactaccgacaacg

SEQ ID NO: 13774 - DNA, 21 bp, Artificial Sequence
  Description of Artificial Sequence: Synthetic oligonucleotide
aatacgaaactaccgacaacg

SEQ ID NO: 13775 - DNA, 23 bp, Artificial Sequence
  Description of Artificial Sequence: Synthetic oligonucleotide
taaggtagcgataattttacgtg

SEQ ID NO: 13776 - DNA, 21 bp, Artificial Sequence
  Description of Artificial Sequence: Synthetic oligonucleotide
gcgataattttacgtggatag

SEQ ID NO: 13777 - DNA, 22 bp, Artificial Sequence
  Description of Artificial Sequence: Synthetic oligonucleotide
cctacgcaaatacgaaactacc

SEQ ID NO: 13778 - DNA, 22 bp, Artificial Sequence
  Description of Artificial Sequence: Synthetic oligonucleotide
ccctacgcaaatacgaaactac

SEQ ID NO: 13779 - DNA, 20 bp, Artificial Sequence
  Description of Artificial Sequence: Synthetic oligonucleotide
caaacgcgaaaatactaacc

SEQ ID NO: 13780 - DNA, 21 bp, Artificial Sequence
  Description of Artificial Sequence: Synthetic oligonucleotide
tattaaagtgggatcgtcgta

SEQ ID NO: 13781 - DNA, 30 bp, Artificial Sequence
  Description of Artificial Sequence: Synthetic oligonucleotide
gaacgcgagtttttaaagtatatacgtatt

SEQ ID NO: 13782 - DNA, 19 bp, Artificial Sequence
  Description of Artificial Sequence: Synthetic oligonucleotide
agttcgattagtgtttgga

SEQ ID NO: 13783 - DNA, 20 bp, Artificial Sequence
  Description of Artificial Sequence: Synthetic oligonucleotide
ccaaacgcgaaaatactaac

SEQ ID NO: 13784 - DNA, 21 bp, Artificial Sequence
  Description of Artificial Sequence: Synthetic oligonucleotide
agcgataattttacgtggata

SEQ ID NO: 13785 - DNA, 19 bp, Artificial Sequence
  Description of Artificial Sequence: Synthetic oligonucleotide
tacgaaactaccgacaacg

SEQ ID NO: 13786 - DNA, 21 bp, Artificial Sequence
  Description of Artificial Sequence: Synthetic oligonucleotide
aggtagcgataattttacgtg

SEQ ID NO: 13787 - DNA, 19 bp, Artificial Sequence
  Description of Artificial Sequence: Synthetic oligonucleotide
tggataggatggaagtttt

SEQ ID NO: 13788 - DNA, 22 bp, Artificial Sequence
  Description of Artificial Sequence: Synthetic oligonucleotide
ttattaaagtgggatcgtcgta

SEQ ID NO: 13789 - DNA, 21 bp, Artificial Sequence
  Description of Artificial Sequence: Synthetic oligonucleotide
tagcgataattttacgtggat

SEQ ID NO: 13790 - DNA, 22 bp, Artificial Sequence
  Description of Artificial Sequence: Synthetic oligonucleotide
aaatacgaaactaccgacaacg

SEQ ID NO: 13791 - DNA, 21 bp, Artificial Sequence
  Description of Artificial Sequence: Synthetic oligonucleotide
acgacgaaataaataacccct

SEQ ID NO: 13792 - DNA, 22 bp, Artificial Sequence
  Description of Artificial Sequence: Synthetic oligonucleotide
ttagttgcgcgtttttagtatt

SEQ ID NO: 13793 - DNA, 16 bp, Artificial Sequence
  Description of Artificial Sequence: Synthetic oligonucleotide
tagcgttcggcgtttt

SEQ ID NO: 13794 - DNA, 19 bp, Artificial Sequence
  Description of Artificial Sequence: Synthetic oligonucleotide
ggagtttcgcgtatttttt

SEQ ID NO: 13795 - DNA, 21 bp, Artificial Sequence
  Description of Artificial Sequence: Synthetic oligonucleotide
ggtagcgataattttacgtgg

SEQ ID NO: 13796 - DNA, 22 bp, Artificial Sequence
  Description of Artificial Sequence: Synthetic oligonucleotide
attattaaagtgggatcgtcgt

SEQ ID NO: 13797 - DNA, 21 bp, Artificial Sequence
  Description of Artificial Sequence: Synthetic oligonucleotide
ataatccaaacgcgaaaatac

SEQ ID NO: 13798 - DNA, 21 bp, Artificial Sequence
  Description of Artificial Sequence: Synthetic oligonucleotide
ggatcgtcgtagttgaaaagt

SEQ ID NO: 13799 - DNA, 18 bp, Artificial Sequence
  Description of Artificial Sequence: Synthetic oligonucleotide
agtttaggcgtttgtgat

SEQ ID NO: 13800 - DNA, 21 bp, Artificial Sequence
  Description of Artificial Sequence: Synthetic oligonucleotide
tagttgcgcgtttttagtatt

SEQ ID NO: 13801 - DNA, 18 bp, Artificial Sequence
  Description of Artificial Sequence: Synthetic oligonucleotide
agcgttcggcgttttcgg

SEQ ID NO: 13802 - DNA, 20 bp, Artificial Sequence
  Description of Artificial Sequence: Synthetic oligonucleotide
cgacgaaataaataacccct

SEQ ID NO: 13803 - DNA, 20 bp, Artificial Sequence
  Description of Artificial Sequence: Synthetic oligonucleotide
tacgcaaatacgaaactacc

SEQ ID NO: 13804 - DNA, 22 bp, Artificial Sequence
  Description of Artificial Sequence: Synthetic oligonucleotide
attaaagtgggatcgtcgtagt

SEQ ID NO: 13805 - DNA, 20 bp, Artificial Sequence
  Description of Artificial Sequence: Synthetic oligonucleotide
aaacgcgaaaatactaaccc

SEQ ID NO: 13806 - DNA, 21 bp, Artificial Sequence
  Description of Artificial Sequence: Synthetic oligonucleotide
tccaaacgcgaaaatactaac

SEQ ID NO: 13807 - DNA, 22 bp, Artificial Sequence
  Description of Artificial Sequence: Synthetic oligonucleotide
tccctacgcaaatacgaaacta

SEQ ID NO: 13808 - DNA, 21 bp, Artificial Sequence
  Description of Artificial Sequence: Synthetic oligonucleotide
attaaagtgggatcgtcgtag

SEQ ID NO: 13809 - DNA, 22 bp, Artificial Sequence
  Description of Artificial Sequence: Synthetic oligonucleotide
aacgacgaaataaataacccct

SEQ ID NO: 13810 - DNA, 16 bp, Artificial Sequence
  Description of Artificial Sequence: Synthetic oligonucleotide
ggcggagtttcgcgta

SEQ ID NO: 13811 - DNA, 17 bp, Artificial Sequence
  Description of Artificial Sequence: Synthetic oligonucleotide
tttcggaaagtttgggg

SEQ ID NO: 13812 - DNA, 22 bp, Artificial Sequence
  Description of Artificial Sequence: Synthetic oligonucleotide
aataatccaaacgcgaaaatac

SEQ ID NO: 13813 - DNA, 22 bp, Artificial Sequence
  Description of Artificial Sequence: Synthetic oligonucleotide
gcgataattttacgtggatagg

SEQ ID NO: 13814 - DNA, 21 bp, Artificial Sequence
  Description of Artificial Sequence: Synthetic oligonucleotide
tacgcaaatacgaaactaccg

SEQ ID NO: 13815 - DNA, 20 bp, Artificial Sequence
  Description of Artificial Sequence: Synthetic oligonucleotide
taaagtgggatcgtcgtagt

SEQ ID NO: 13816 - DNA, 22 bp, Artificial Sequence
  Description of Artificial Sequence: Synthetic oligonucleotide
atccaaacgcgaaaatactaac

SEQ ID NO: 13817 - DNA, 18 bp, Artificial Sequence
  Description of Artificial Sequence: Synthetic oligonucleotide
ctccctacgcaaatacga

SEQ ID NO: 13818 - DNA, 20 bp, Artificial Sequence
  Description of Artificial Sequence: Synthetic oligonucleotide
taatccaaacgcgaaaatac

SEQ ID NO: 13819 - DNA, 19 bp, Artificial Sequence
  Description of Artificial Sequence: Synthetic oligonucleotide
aacgcgaaaatactaaccc

SEQ ID NO: 13820 - DNA, 22 bp, Artificial Sequence
  Description of Artificial Sequence: Synthetic oligonucleotide
gcaaatacgaaactaccgacaa

SEQ ID NO: 13821 - DNA, 21 bp, Artificial Sequence
  Description of Artificial Sequence: Synthetic oligonucleotide
ttaaagtgggatcgtcgtagt

SEQ ID NO: 13822 - DNA, 20 bp, Artificial Sequence
  Description of Artificial Sequence: Synthetic oligonucleotide
ttaaagtgggatcgtcgtag

SEQ ID NO: 13823 - DNA, 18 bp, Artificial Sequence
  Description of Artificial Sequence: Synthetic oligonucleotide
tccctacgcaaatacgaa

SEQ ID NO: 13824 - DNA, 20 bp, Artificial Sequence
  Description of Artificial Sequence: Synthetic oligonucleotide
ctaaataatccaaacgcgaa

SEQ ID NO: 13825 - DNA, 19 bp, Artificial Sequence
  Description of Artificial Sequence: Synthetic oligonucleotide
gaaggattttgggttagta

SEQ ID NO: 13826 - DNA, 18 bp, Artificial Sequence
  Description of Artificial Sequence: Synthetic oligonucleotide
acgaaactaccgacaacg

SEQ ID NO: 13827 - DNA, 17 bp, Artificial Sequence
  Description of Artificial Sequence: Synthetic oligonucleotide
gtggataggatggaagt

SEQ ID NO: 13828 - DNA, 22 bp, Artificial Sequence
  Description of Artificial Sequence: Synthetic oligonucleotide
cgaacgctaaatactaaaaacg

SEQ ID NO: 13829 - DNA, 22 bp, Artificial Sequence
  Description of Artificial Sequence: Synthetic oligonucleotide
tagggtagagagtatcgttgcg

SEQ ID NO: 13830 - DNA, 22 bp, Artificial Sequence
  Description of Artificial Sequence: Synthetic oligonucleotide
gacgtaggcgtttacgtatcgt

SEQ ID NO: 13831 - DNA, 23 bp, Artificial Sequence
  Description of Artificial Sequence: Synthetic oligonucleotide
ttcgggtttttaggcgtggggta

SEQ ID NO: 13832 - DNA, 22 bp, Artificial Sequence
  Description of Artificial Sequence: Synthetic oligonucleotide
ttcgtaagtttaggttttcgtt

SEQ ID NO: 13833 - DNA, 23 bp, Artificial Sequence
  Description of Artificial Sequence: Synthetic oligonucleotide
ctataacctcgataaaactcgaa

SEQ ID NO: 13834 - DNA, 24 bp, Artificial Sequence
  Description of Artificial Sequence: Synthetic oligonucleotide
gtcgttggtattcgtgatttacga

SEQ ID NO: 13835 - DNA, 23 bp, Artificial Sequence
  Description of Artificial Sequence: Synthetic oligonucleotide
atcgggtttagtttattttgcgg

SEQ ID NO: 13836 - DNA, 22 bp, Artificial Sequence
  Description of Artificial Sequence: Synthetic oligonucleotide
tataacctcgataaaactcgaa

SEQ ID NO: 13837 - DNA, 23 bp, Artificial Sequence
  Description of Artificial Sequence: Synthetic oligonucleotide
cgtagtagttgggtatgtttacg

SEQ ID NO: 13838 - DNA, 22 bp, Artificial Sequence
  Description of Artificial Sequence: Synthetic oligonucleotide
gcgactaataaataacctcgat

SEQ ID NO: 13839 - DNA, 21 bp, Artificial Sequence
  Description of Artificial Sequence: Synthetic oligonucleotide
tacgtttatttatcgtatcga

SEQ ID NO: 13840 - DNA, 16 bp, Artificial Sequence
  Description of Artificial Sequence: Synthetic oligonucleotide
ggcgagttgatgtcgg

SEQ ID NO: 13841 - DNA, 23 bp, Artificial Sequence
  Description of Artificial Sequence: Synthetic oligonucleotide
tcgtaagtttaggttttcgttta

SEQ ID NO: 13842 - DNA, 16 bp, Artificial Sequence
  Description of Artificial Sequence: Synthetic oligonucleotide
tgcggtcgtttaggga

SEQ ID NO: 13843 - DNA, 21 bp, Artificial Sequence
  Description of Artificial Sequence: Synthetic oligonucleotide
ataacctcgataaaactcgaa

SEQ ID NO: 13844 - DNA, 22 bp, Artificial Sequence
  Description of Artificial Sequence: Synthetic oligonucleotide
cgtaagtttaggttttcgttta

SEQ ID NO: 13845 - DNA, 23 bp, Artificial Sequence
  Description of Artificial Sequence: Synthetic oligonucleotide
gttcgtaagtttaggttttcgtt

SEQ ID NO: 13846 - DNA, 19 bp, Artificial Sequence
  Description of Artificial Sequence: Synthetic oligonucleotide
ttagtttattttgcggtcg

SEQ ID NO: 13847 - DNA, 22 bp, Artificial Sequence
  Description of Artificial Sequence: Synthetic oligonucleotide
aaaacgaaaccacgactataac

SEQ ID NO: 13848 - DNA, 19 bp, Artificial Sequence
  Description of Artificial Sequence: Synthetic oligonucleotide
tttcgagttttatcgaggt

SEQ ID NO: 13849 - DNA, 19 bp, Artificial Sequence
  Description of Artificial Sequence: Synthetic oligonucleotide
tttcgaggacgaagttgat

SEQ ID NO: 13850 - DNA, 22 bp, Artificial Sequence
  Description of Artificial Sequence: Synthetic oligonucleotide
gatacaaaatctacgaaccgac

SEQ ID NO: 13851 - DNA, 20 bp, Artificial Sequence
  Description of Artificial Sequence: Synthetic oligonucleotide
ttcggattttcggtgttcgt

SEQ ID NO: 13852 - DNA, 17 bp, Artificial Sequence
  Description of Artificial Sequence: Synthetic oligonucleotide
tggaattcgcgtttgag

SEQ ID NO: 13853 - DNA, 20 bp, Artificial Sequence
  Description of Artificial Sequence: Synthetic oligonucleotide
taacctcgataaaactcgaa

SEQ ID NO: 13854 - DNA, 19 bp, Artificial Sequence
  Description of Artificial Sequence: Synthetic oligonucleotide
gttttcgaggacgaagttg

SEQ ID NO: 13855 - DNA, 18 bp, Artificial Sequence
  Description of Artificial Sequence: Synthetic oligonucleotide
ggttttcgaggacgaagt

SEQ ID NO: 13856 - DNA, 18 bp, Artificial Sequence
  Description of Artificial Sequence: Synthetic oligonucleotide
ttttcgaggacgaagttg

SEQ ID NO: 13857 - DNA, 20 bp, Artificial Sequence
  Description of Artificial Sequence: Synthetic oligonucleotide
taacacccgtaacctacgac

SEQ ID NO: 13858 - DNA, 20 bp, Artificial Sequence
  Description of Artificial Sequence: Synthetic oligonucleotide
tatagcgcgtttattggttt

SEQ ID NO: 13859 - DNA, 16 bp, Artificial Sequence
  Description of Artificial Sequence: Synthetic oligonucleotide
gacgttcgttacgggt

SEQ ID NO: 13860 - DNA, 16 bp, Artificial Sequence
  Description of Artificial Sequence: Synthetic oligonucleotide
ggaagtaggtatgggg

SEQ ID NO: 13861 - DNA, 22 bp, Artificial Sequence
  Description of Artificial Sequence: Synthetic oligonucleotide
actcaaaactaacgacgaaact

SEQ ID NO: 13862 - DNA, 18 bp, Artificial Sequence
  Description of Artificial Sequence: Synthetic oligonucleotide
gatttcggtggagtcgat

SEQ ID NO: 13863 - DNA, 23 bp, Artificial Sequence
  Description of Artificial Sequence: Synthetic oligonucleotide
atcgatattagttcgtttttcgt

SEQ ID NO: 13864 - DNA, 21 bp, Artificial Sequence
  Description of Artificial Sequence: Synthetic oligonucleotide
atttttatgttggatttaggg

SEQ ID NO: 13865 - DNA, 19 bp, Artificial Sequence
  Description of Artificial Sequence: Synthetic oligonucleotide
cgaatcccactaaaactcg

SEQ ID NO: 13866 - DNA, 21 bp, Artificial Sequence
  Description of Artificial Sequence: Synthetic oligonucleotide
ttatacgttagtttcggttgc

SEQ ID NO: 13867 - DNA, 16 bp, Artificial Sequence
  Description of Artificial Sequence: Synthetic oligonucleotide
gtttgcggatcggcgg

SEQ ID NO: 13868 - DNA, 18 bp, Artificial Sequence
  Description of Artificial Sequence: Synthetic oligonucleotide
atcgggggttcgggacgg

SEQ ID NO: 13869 - DNA, 21 bp, Artificial Sequence
  Description of Artificial Sequence: Synthetic oligonucleotide
ttaacacccgtaacctacgac

SEQ ID NO: 13870 - DNA, 22 bp, Artificial Sequence
  Description of Artificial Sequence: Synthetic oligonucleotide
tttatacgttagtttcggttgc

SEQ ID NO: 13871 - DNA, 23 bp, Artificial Sequence
  Description of Artificial Sequence: Synthetic oligonucleotide
cgtttactcctaaaacaaacgat

SEQ ID NO: 13872 - DNA, 20 bp, Artificial Sequence
  Description of Artificial Sequence: Synthetic oligonucleotide
tattttataggtcgggttcg

SEQ ID NO: 13873 - DNA, 16 bp, Artificial Sequence
  Description of Artificial Sequence: Synthetic oligonucleotide
ttcggcgacgtttcgg

SEQ ID NO: 13874 - DNA, 21 bp, Artificial Sequence
  Description of Artificial Sequence: Synthetic oligonucleotide
gggatttttatatttggagag

SEQ ID NO: 13875 - DNA, 19 bp, Artificial Sequence
  Description of Artificial Sequence: Synthetic oligonucleotide
acgaccaccttaaaaatcg

SEQ ID NO: 13876 - DNA, 22 bp, Artificial Sequence
  Description of Artificial Sequence: Synthetic oligonucleotide
cggttaatagtttcgtttaggg

SEQ ID NO: 13877 - DNA, 16 bp, Artificial Sequence
  Description of Artificial Sequence: Synthetic oligonucleotide
tgttcggcgttcgcga

SEQ ID NO: 13878 - DNA, 17 bp, Artificial Sequence
  Description of Artificial Sequence: Synthetic oligonucleotide
attgggcgtttttcgag

SEQ ID NO: 13879 - DNA, 19 bp, Artificial Sequence
  Description of Artificial Sequence: Synthetic oligonucleotide
cgacgaccaccttaaaaat

SEQ ID NO: 13880 - DNA, 19 bp, Artificial Sequence
  Description of Artificial Sequence: Synthetic oligonucleotide
aacacccgtaacctacgac

SEQ ID NO: 13881 - DNA, 19 bp, Artificial Sequence
  Description of Artificial Sequence: Synthetic oligonucleotide
atagcgcgtttattggttt

SEQ ID NO: 13882 - DNA, 22 bp, Artificial Sequence
  Description of Artificial Sequence: Synthetic oligonucleotide
gcggttaatagtttcgtttagg

SEQ ID NO: 13883 - DNA, 22 bp, Artificial Sequence
  Description of Artificial Sequence: Synthetic oligonucleotide
cgttgtttaggtagttttgtcg

SEQ ID NO: 13884 - DNA, 20 bp, Artificial Sequence
  Description of Artificial Sequence: Synthetic oligonucleotide
taccgtcgtttttcaaatca

SEQ ID NO: 13885 - DNA, 16 bp, Artificial Sequence
  Description of Artificial Sequence: Synthetic oligonucleotide
ggcgttttcgggacgt

SEQ ID NO: 13886 - DNA, 16 bp, Artificial Sequence
  Description of Artificial Sequence: Synthetic oligonucleotide
gtcggcgtgggcgatg

SEQ ID NO: 13887 - DNA, 19 bp, Artificial Sequence
  Description of Artificial Sequence: Synthetic oligonucleotide
ctactaactccacgtcccg

SEQ ID NO: 13888 - DNA, 16 bp, Artificial Sequence
  Description of Artificial Sequence: Synthetic oligonucleotide
ggagtcgcgagggtgg

SEQ ID NO: 13889 - DNA, 22 bp, Artificial Sequence
  Description of Artificial Sequence: Synthetic oligonucleotide
aaactaaccgaacaaacgtaat

SEQ ID NO: 13890 - DNA, 22 bp, Artificial Sequence
  Description of Artificial Sequence: Synthetic oligonucleotide
gtaggtatcgtagtcgtcgttt

SEQ ID NO: 13891 - DNA, 16 bp, Artificial Sequence
  Description of Artificial Sequence: Synthetic oligonucleotide
gtagtcgtgcgcgttt

SEQ ID NO: 13892 - DNA, 23 bp, Artificial Sequence
  Description of Artificial Sequence: Synthetic oligonucleotide
agcgtttcgggtttttatcgcgg

SEQ ID NO: 13893 - DNA, 22 bp, Artificial Sequence
  Description of Artificial Sequence: Synthetic oligonucleotide
taggtatcgtagtcgtcgtttc

SEQ ID NO: 13894 - DNA, 21 bp, Artificial Sequence
  Description of Artificial Sequence: Synthetic oligonucleotide
atctcctactctacgtcctcg

SEQ ID NO: 13895 - DNA, 22 bp, Artificial Sequence
  Description of Artificial Sequence: Synthetic oligonucleotide
attacgtttgttcggttagttt

SEQ ID NO: 13896 - DNA, 21 bp, Artificial Sequence
  Description of Artificial Sequence: Synthetic oligonucleotide
tgtgagggatttgggttgtgg

SEQ ID NO: 13897 - DNA, 16 bp, Artificial Sequence
  Description of Artificial Sequence: Synthetic oligonucleotide
ttcgggatggtagcgg

SEQ ID NO: 13898 - DNA, 22 bp, Artificial Sequence
  Description of Artificial Sequence: Synthetic oligonucleotide
cgtttagtttttatcgcgtatt

SEQ ID NO: 13899 - DNA, 26 bp, Artificial Sequence
  Description of Artificial Sequence: Synthetic oligonucleotide
ttcggttagttttcgggagttcgttg

SEQ ID NO: 13900 - DNA, 21 bp, Artificial Sequence
  Description of Artificial Sequence: Synthetic oligonucleotide
gtgggtaggtatcgtagtcgt

SEQ ID NO: 13901 - DNA, 18 bp, Artificial Sequence
  Description of Artificial Sequence: Synthetic oligonucleotide
ttcgtttgtttacggcgt

SEQ ID NO: 13902 - DNA, 22 bp, Artificial Sequence
  Description of Artificial Sequence: Synthetic oligonucleotide
aatctcctactctacgtcctcg

SEQ ID NO: 13903 - DNA, 22 bp, Artificial Sequence
  Description of Artificial Sequence: Synthetic oligonucleotide
aaaactaaccgaacaaacgtaa

SEQ ID NO: 13904 - DNA, 22 bp, Artificial Sequence
  Description of Artificial Sequence: Synthetic oligonucleotide
ttacgtttgttcggttagtttt

SEQ ID NO: 13905 - DNA, 21 bp, Artificial Sequence
  Description of Artificial Sequence: Synthetic oligonucleotide
aggtatcgtagtcgtcgtttc

SEQ ID NO: 13906 - DNA, 23 bp, Artificial Sequence
  Description of Artificial Sequence: Synthetic oligonucleotide
tattacgtttgttcggttagttt

SEQ ID NO: 13907 - DNA, 20 bp, Artificial Sequence
  Description of Artificial Sequence: Synthetic oligonucleotide
ggtatcgtagtcgtcgtttc

SEQ ID NO: 13908 - DNA, 22 bp, Artificial Sequence
  Description of Artificial Sequence: Synthetic oligonucleotide
tacgtttgttcggttagttttc

SEQ ID NO: 13909 - DNA, 20 bp, Artificial Sequence
  Description of Artificial Sequence: Synthetic oligonucleotide
tgggtaggtatcgtagtcgt

SEQ ID NO: 13910 - DNA, 20 bp, Artificial Sequence
  Description of Artificial Sequence: Synthetic oligonucleotide
tctcctactctacgtcctcg

SEQ ID NO: 13911 - DNA, 23 bp, Artificial Sequence
  Description of Artificial Sequence: Synthetic oligonucleotide
aaaactaaccgaacaaacgtaat

SEQ ID NO: 13912 - DNA, 22 bp, Artificial Sequence
  Description of Artificial Sequence: Synthetic oligonucleotide
ggtaggtatcgtagtcgtcgtt

SEQ ID NO: 13913 - DNA, 23 bp, Artificial Sequence
  Description of Artificial Sequence: Synthetic oligonucleotide
gtattacgtttgttcggttagtt

SEQ ID NO: 13914 - DNA, 21 bp, Artificial Sequence
  Description of Artificial Sequence: Synthetic oligonucleotide
aactaaccgaacaaacgtaat

SEQ ID NO: 13915 - DNA, 22 bp, Artificial Sequence
  Description of Artificial Sequence: Synthetic oligonucleotide
gaaaactaaccgaacaaacgta

SEQ ID NO: 13916 - DNA, 22 bp, Artificial Sequence
  Description of Artificial Sequence: Synthetic oligonucleotide
aatacgcgataaaaactaaacg

SEQ ID NO: 13917 - DNA, 20 bp, Artificial Sequence
  Description of Artificial Sequence: Synthetic oligonucleotide
gtgggtaggtatcgtagtcg

SEQ ID NO: 13918 - DNA, 24 bp, Artificial Sequence
  Description of Artificial Sequence: Synthetic oligonucleotide
tacgtttgttcggttagttttcgg

SEQ ID NO: 13919 - DNA, 22 bp, Artificial Sequence
  Description of Artificial Sequence: Synthetic oligonucleotide
agcggttttgcgagggattcgg

SEQ ID NO: 13920 - DNA, 21 bp, Artificial Sequence
  Description of Artificial Sequence: Synthetic oligonucleotide
acgtttgttcggttagttttc

SEQ ID NO: 13921 - DNA, 20 bp, Artificial Sequence
  Description of Artificial Sequence: Synthetic oligonucleotide
cgtttgttcggttagttttc

SEQ ID NO: 13922 - DNA, 20 bp, Artificial Sequence
  Description of Artificial Sequence: Synthetic oligonucleotide
gtttgttcggttagttttcg

SEQ ID NO: 13923 - DNA, 21 bp, Artificial Sequence
  Description of Artificial Sequence: Synthetic oligonucleotide
tgggtaggtatcgtagtcgtc

SEQ ID NO: 13924 - DNA, 20 bp, Artificial Sequence
  Description of Artificial Sequence: Synthetic oligonucleotide
gggtaggtatcgtagtcgtc

SEQ ID NO: 13925 - DNA, 20 bp, Artificial Sequence
  Description of Artificial Sequence: Synthetic oligonucleotide
gtgcgcgtttagtttttatc

SEQ ID NO: 13926 - DNA, 19 bp, Artificial Sequence
  Description of Artificial Sequence: Synthetic oligonucleotide
cggtgggtaggtatcgtag

SEQ ID NO: 13927 - DNA, 16 bp, Artificial Sequence
  Description of Artificial Sequence: Synthetic oligonucleotide
ttttacgcgcggtagt

SEQ ID NO: 13928 - DNA, 20 bp, Artificial Sequence
  Description of Artificial Sequence: Synthetic oligonucleotide
gataaaaactaaacgcgcac

SEQ ID NO: 13929 - DNA, 20 bp, Artificial Sequence
  Description of Artificial Sequence: Synthetic oligonucleotide
cctactctacgtcctcgacc

SEQ ID NO: 13930 - DNA, 23 bp, Artificial Sequence
  Description of Artificial Sequence: Synthetic oligonucleotide
taatacgcgataaaaactaaacg

SEQ ID NO: 13931 - DNA, 19 bp, Artificial Sequence
  Description of Artificial Sequence: Synthetic oligonucleotide
aaacaaactccgaacgaaa

SEQ ID NO: 13932 - DNA, 22 bp, Artificial Sequence
  Description of Artificial Sequence: Synthetic oligonucleotide
gatagagtattcggtttatcgg

SEQ ID NO: 13933 - DNA, 17 bp, Artificial Sequence
  Description of Artificial Sequence: Synthetic oligonucleotide
aggttttgggggtgtgg

SEQ ID NO: 13934 - DNA, 16 bp, Artificial Sequence
  Description of Artificial Sequence: Synthetic oligonucleotide
atgggggtaggaagtg

SEQ ID NO: 13935 - DNA, 19 bp, Artificial Sequence
  Description of Artificial Sequence: Synthetic oligonucleotide
aaaaacaaactccgaacga

SEQ ID NO: 13936 - DNA, 19 bp, Artificial Sequence
  Description of Artificial Sequence: Synthetic oligonucleotide
aaaacaaactccgaacgaa

SEQ ID NO: 13937 - DNA, 21 bp, Artificial Sequence
  Description of Artificial Sequence: Synthetic oligonucleotide
atacgcgataaaaactaaacg

SEQ ID NO: 13938 - DNA, 18 bp, Artificial Sequence
  Description of Artificial Sequence: Synthetic oligonucleotide
agcgtttcgggtttttat

SEQ ID NO: 13939 - DNA, 16 bp, Artificial Sequence
  Description of Artificial Sequence: Synthetic oligonucleotide
agtcgtgcgcgtttag

SEQ ID NO: 13940 - DNA, 25 bp, Artificial Sequence
  Description of Artificial Sequence: Synthetic oligonucleotide
agggtagtgttttttttacgcgcgg

SEQ ID NO: 13941 - DNA, 19 bp, Artificial Sequence
  Description of Artificial Sequence: Synthetic oligonucleotide
tagttttcgggagttcgtt

SEQ ID NO: 13942 - DNA, 19 bp, Artificial Sequence
  Description of Artificial Sequence: Synthetic oligonucleotide
gttagttttcgggagttcg

SEQ ID NO: 13943 - DNA, 22 bp, Artificial Sequence
  Description of Artificial Sequence: Synthetic oligonucleotide
ggtgggtaggtatcgtagtcgt

SEQ ID NO: 13944 - DNA, 19 bp, Artificial Sequence
  Description of Artificial Sequence: Synthetic oligonucleotide
acaaactccgaacgaaaac

SEQ ID NO: 13945 - DNA, 21 bp, Artificial Sequence
  Description of Artificial Sequence: Synthetic oligonucleotide
cgaggacgtagagtaggagat

SEQ ID NO: 13946 - DNA, 19 bp, Artificial Sequence
  Description of Artificial Sequence: Synthetic oligonucleotide
tcggtgggtaggtatcgta

SEQ ID NO: 13947 - DNA, 23 bp, Artificial Sequence
  Description of Artificial Sequence: Synthetic oligonucleotide
gaaaactaaccgaacaaacgtaa

SEQ ID NO: 13948 - DNA, 22 bp, Artificial Sequence
  Description of Artificial Sequence: Synthetic oligonucleotide
gtaatacgcgataaaaactaaa

SEQ ID NO: 13949 - DNA, 20 bp, Artificial Sequence
  Description of Artificial Sequence: Synthetic oligonucleotide
ttagttttcgggagttcgtt

SEQ ID NO: 13950 - DNA, 19 bp, Artificial Sequence
  Description of Artificial Sequence: Synthetic oligonucleotide
atcttctcccgataaaccg

SEQ ID NO: 13951 - DNA, 17 bp, Artificial Sequence
  Description of Artificial Sequence: Synthetic oligonucleotide
attcgggtcgcggtcga

SEQ ID NO: 13952 - DNA, 19 bp, Artificial Sequence
  Description of Artificial Sequence: Synthetic oligonucleotide
tagagtaggagattgatag

SEQ ID NO: 13953 - DNA, 18 bp, Artificial Sequence
  Description of Artificial Sequence: Synthetic oligonucleotide
gcgtttcgggtttttatc

SEQ ID NO: 13954 - DNA, 18 bp, Artificial Sequence
  Description of Artificial Sequence: Synthetic oligonucleotide
gtttcgggtttttatcgc

SEQ ID NO: 13955 - DNA, 18 bp, Artificial Sequence
  Description of Artificial Sequence: Synthetic oligonucleotide
gtgcgcgtttagttttta

SEQ ID NO: 13956 - DNA, 19 bp, Artificial Sequence
  Description of Artificial Sequence: Synthetic oligonucleotide
tgcgcgtttagtttttatc

SEQ ID NO: 13957 - DNA, 22 bp, Artificial Sequence
  Description of Artificial Sequence: Synthetic oligonucleotide
tgatagagtattcggtttatcg

SEQ ID NO: 13958 - DNA, 19 bp, Artificial Sequence
  Description of Artificial Sequence: Synthetic oligonucleotide
gagcgtttcgggtttttat

SEQ ID NO: 13959 - DNA, 21 bp, Artificial Sequence
  Description of Artificial Sequence: Synthetic oligonucleotide
gtcgaggacgtagagtaggag

SEQ ID NO: 13960 - DNA, 19 bp, Artificial Sequence
  Description of Artificial Sequence: Synthetic oligonucleotide
tactctacgtcctcgaccg

SEQ ID NO: 13961 - DNA, 21 bp, Artificial Sequence
  Description of Artificial Sequence: Synthetic oligonucleotide
tacgcgataaaaactaaacgc

SEQ ID NO: 13962 - DNA, 18 bp, Artificial Sequence
  Description of Artificial Sequence: Synthetic oligonucleotide
aacaaactccgaacgaaa

SEQ ID NO: 13963 - DNA, 21 bp, Artificial Sequence
  Description of Artificial Sequence: Synthetic oligonucleotide
ggtgggtaggtatcgtagtcg

SEQ ID NO: 13964 - DNA, 20 bp, Artificial Sequence
  Description of Artificial Sequence: Synthetic oligonucleotide
aacaaactccgaacgaaaac

SEQ ID NO: 13965 - DNA, 24 bp, Artificial Sequence
  Description of Artificial Sequence: Synthetic oligonucleotide
gaaaactaaccgaacaaacgtaat

SEQ ID NO: 13966 - DNA, 20 bp, Artificial Sequence
  Description of Artificial Sequence: Synthetic oligonucleotide
ctactctacgtcctcgaccg

SEQ ID NO: 13967 - DNA, 19 bp, Artificial Sequence
  Description of Artificial Sequence: Synthetic oligonucleotide
tttgttcggttagttttcg

SEQ ID NO: 13968 - DNA, 20 bp, Artificial Sequence
  Description of Artificial Sequence: Synthetic oligonucleotide
aatcttctcccgataaaccg

SEQ ID NO: 13969 - DNA, 22 bp, Artificial Sequence
  Description of Artificial Sequence: Synthetic oligonucleotide
atagagtattcggtttatcggg

SEQ ID NO: 13970 - DNA, 19 bp, Artificial Sequence
  Description of Artificial Sequence: Synthetic oligonucleotide
aacaaactccgaacgaaaa

SEQ ID NO: 13971 - DNA, 18 bp, Artificial Sequence
  Description of Artificial Sequence: Synthetic oligonucleotide
tcttctcccgataaaccg

SEQ ID NO: 13972 - DNA, 18 bp, Artificial Sequence
  Description of Artificial Sequence: Synthetic oligonucleotide
actcccgaaaactaaccg

SEQ ID NO: 13973 - DNA, 18 bp, Artificial Sequence
  Description of Artificial Sequence: Synthetic oligonucleotide
atcgcgtattacgtttgt

SEQ ID NO: 13974 - DNA, 20 bp, Artificial Sequence
  Description of Artificial Sequence: Synthetic oligonucleotide
gcgtttagtttttatcgcgt

SEQ ID NO: 13975 - DNA, 22 bp, Artificial Sequence
  Description of Artificial Sequence: Synthetic oligonucleotide
tcgaggacgtagagtaggagat

SEQ ID NO: 13976 - DNA, 19 bp, Artificial Sequence
  Description of Artificial Sequence: Synthetic oligonucleotide
ccgaaaactaaccgaacaa

SEQ ID NO: 13977 - DNA, 17 bp, Artificial Sequence
  Description of Artificial Sequence: Synthetic oligonucleotide
tttcgggtttttatcgc

SEQ ID NO: 13978 - DNA, 20 bp, Artificial Sequence
  Description of Artificial Sequence: Synthetic oligonucleotide
aaaaacaaactccgaacgaa

SEQ ID NO: 13979 - DNA, 23 bp, Artificial Sequence
  Description of Artificial Sequence: Synthetic oligonucleotide
tgcgcgtttagtttttatcgcgt

SEQ ID NO: 13980 - DNA, 18 bp, Artificial Sequence
  Description of Artificial Sequence: Synthetic oligonucleotide
agttttcgggagttcgtt

SEQ ID NO: 13981 - DNA, 22 bp, Artificial Sequence
  Description of Artificial Sequence: Synthetic oligonucleotide
ataacgaacaacgaaatctacc

SEQ ID NO: 13982 - DNA, 22 bp, Artificial Sequence
  Description of Artificial Sequence: Synthetic oligonucleotide
ttatttattcgatttttgaacg

SEQ ID NO: 13983 - DNA, 18 bp, Artificial Sequence
  Description of Artificial Sequence: Synthetic oligonucleotide
tacgcgtttataggacga

SEQ ID NO: 13984 - DNA, 20 bp, Artificial Sequence
  Description of Artificial Sequence: Synthetic oligonucleotide
ggttataggtttttgagtag

SEQ ID NO: 13985 - DNA, 22 bp, Artificial Sequence
  Description of Artificial Sequence: Synthetic oligonucleotide
atttattcgatttttgaacgtg

SEQ ID NO: 13986 - DNA, 23 bp, Artificial Sequence
  Description of Artificial Sequence: Synthetic oligonucleotide
attatttattcgatttttgaacg

SEQ ID NO: 13987 - DNA, 21 bp, Artificial Sequence
  Description of Artificial Sequence: Synthetic oligonucleotide
tttattcgatttttgaacgtg

SEQ ID NO: 13988 - DNA, 23 bp, Artificial Sequence
  Description of Artificial Sequence: Synthetic oligonucleotide
tataacgaacaacgaaatctacc

SEQ ID NO: 13989 - DNA, 21 bp, Artificial Sequence
  Description of Artificial Sequence: Synthetic oligonucleotide
taacgaacaacgaaatctacc

SEQ ID NO: 13990 - DNA, 22 bp, Artificial Sequence
  Description of Artificial Sequence: Synthetic oligonucleotide
acgaacaacgaaatctaccata

SEQ ID NO: 13991 - DNA, 23 bp, Artificial Sequence
  Description of Artificial Sequence: Synthetic oligonucleotide
tatttattcgatttttgaacgtg

SEQ ID NO: 13992 - DNA, 21 bp, Artificial Sequence
  Description of Artificial Sequence: Synthetic oligonucleotide
cgaacaacgaaatctaccata

SEQ ID NO: 13993 - DNA, 20 bp, Artificial Sequence
  Description of Artificial Sequence: Synthetic oligonucleotide
ttattcgatttttgaacgtg

SEQ ID NO: 13994 - DNA, 20 bp, Artificial Sequence
  Description of Artificial Sequence: Synthetic oligonucleotide
aacgaacaacgaaatctacc

SEQ ID NO: 13995 - DNA, 19 bp, Artificial Sequence
  Description of Artificial Sequence: Synthetic oligonucleotide
ccctcctaactaacgaacg

SEQ ID NO: 13996 - DNA, 22 bp, Artificial Sequence
  Description of Artificial Sequence: Synthetic oligonucleotide
tagatcgagtttttagcgtagc

SEQ ID NO: 13997 - DNA, 17 bp, Artificial Sequence
  Description of Artificial Sequence: Synthetic oligonucleotide
ttcggatttcgcgtcgg

SEQ ID NO: 13998 - DNA, 19 bp, Artificial Sequence
  Description of Artificial Sequence: Synthetic oligonucleotide
tgcgggttagatgtggcgt

SEQ ID NO: 13999 - DNA, 23 bp, Artificial Sequence
  Description of Artificial Sequence: Synthetic oligonucleotide
ctataacgaacaacgaaatctac

SEQ ID NO: 14000 - DNA, 21 bp, Artificial Sequence
  Description of Artificial Sequence: Synthetic oligonucleotide
agatcgagtttttagcgtagc

SEQ ID NO: 14001 - DNA, 22 bp, Artificial Sequence
  Description of Artificial Sequence: Synthetic oligonucleotide
gttatagatcgagtttttagcg

SEQ ID NO: 14002 - DNA, 23 bp, Artificial Sequence
  Description of Artificial Sequence: Synthetic oligonucleotide
atagatcgagtttttagcgtagc

SEQ ID NO: 14003 - DNA, 20 bp, Artificial Sequence
  Description of Artificial Sequence: Synthetic oligonucleotide
gatcgagtttttagcgtagc

SEQ ID NO: 14004 - DNA, 22 bp, Artificial Sequence
  Description of Artificial Sequence: Synthetic oligonucleotide
atatcggttcggagttagatta

SEQ ID NO: 14005 - DNA, 21 bp, Artificial Sequence
  Description of Artificial Sequence: Synthetic oligonucleotide
aaaaacccgacatactaaacg

SEQ ID NO: 14006 - DNA, 22 bp, Artificial Sequence
  Description of Artificial Sequence: Synthetic oligonucleotide
gtcgttattgagagtcgttcgg

SEQ ID NO: 14007 - DNA, 24 bp, Artificial Sequence
  Description of Artificial Sequence: Synthetic oligonucleotide
gggttttataagtattagattata

SEQ ID NO: 14008 - DNA, 20 bp, Artificial Sequence
  Description of Artificial Sequence: Synthetic oligonucleotide
aaaacccgacatactaaacg

SEQ ID NO: 14009 - DNA, 20 bp, Artificial Sequence
  Description of Artificial Sequence: Synthetic oligonucleotide
cgaggagtttagcgttagtg

SEQ ID NO: 14010 - DNA, 22 bp, Artificial Sequence
  Description of Artificial Sequence: Synthetic oligonucleotide
atcttcgacaaaactaaaaacg

SEQ ID NO: 14011 - DNA, 16 bp, Artificial Sequence
  Description of Artificial Sequence: Synthetic oligonucleotide
gaaacgtaggcgtcgg

SEQ ID NO: 14012 - DNA, 17 bp, Artificial Sequence
  Description of Artificial Sequence: Synthetic oligonucleotide
tgggggatagtagggag

SEQ ID NO: 14013 - DNA, 21 bp, Artificial Sequence
  Description of Artificial Sequence: Synthetic oligonucleotide
tcttcgacaaaactaaaaacg

SEQ ID NO: 14014 - DNA, 20 bp, Artificial Sequence
  Description of Artificial Sequence: Synthetic oligonucleotide
gttttattgacgcgattttt

SEQ ID NO: 14015 - DNA, 21 bp, Artificial Sequence
  Description of Artificial Sequence: Synthetic oligonucleotide
aacccgacatactaaacgaat

SEQ ID NO: 14016 - DNA, 18 bp, Artificial Sequence
  Description of Artificial Sequence: Synthetic oligonucleotide
ggttattatgggtagagg

SEQ ID NO: 14017 - DNA, 21 bp, Artificial Sequence
  Description of Artificial Sequence: Synthetic oligonucleotide
tatcggttcggagttagatta

SEQ ID NO: 14018 - DNA, 22 bp, Artificial Sequence
  Description of Artificial Sequence: Synthetic oligonucleotide
cgatcttcgacaaaactaaaaa

SEQ ID NO: 14019 - DNA, 16 bp, Artificial Sequence
  Description of Artificial Sequence: Synthetic oligonucleotide
gagtcggtatcggcgt

SEQ ID NO: 14020 - DNA, 19 bp, Artificial Sequence
  Description of Artificial Sequence: Synthetic oligonucleotide
ggcgtgtttcgtttttatt

SEQ ID NO: 14021 - DNA, 22 bp, Artificial Sequence
  Description of Artificial Sequence: Synthetic oligonucleotide
tatcaaaatctacgcgatctaa

SEQ ID NO: 14022 - DNA, 20 bp, Artificial Sequence
  Description of Artificial Sequence: Synthetic oligonucleotide
ttcgcgttaggtttcgtcgg

SEQ ID NO: 14023 - DNA, 18 bp, Artificial Sequence
  Description of Artificial Sequence: Synthetic oligonucleotide
ggttttcgtaggtcgtta

SEQ ID NO: 14024 - DNA, 21 bp, Artificial Sequence
  Description of Artificial Sequence: Synthetic oligonucleotide
tcgaggagtttagcgttagtg

SEQ ID NO: 14025 - DNA, 22 bp, Artificial Sequence
  Description of Artificial Sequence: Synthetic oligonucleotide
aaacccgacatactaaacgaat

SEQ ID NO: 14026 - DNA, 21 bp, Artificial Sequence
  Description of Artificial Sequence: Synthetic oligonucleotide
gtcgaggagtttagcgttagt

SEQ ID NO: 14027 - DNA, 20 bp, Artificial Sequence
  Description of Artificial Sequence: Synthetic oligonucleotide
caaaactaaaaacgccgata

SEQ ID NO: 14028 - DNA, 22 bp, Artificial Sequence
  Description of Artificial Sequence: Synthetic oligonucleotide
atcaaaatctacgcgatctaaa

SEQ ID NO: 14029 - DNA, 19 bp, Artificial Sequence
  Description of Artificial Sequence: Synthetic oligonucleotide
gtcgttggtcggtagagag

SEQ ID NO: 14030 - DNA, 22 bp, Artificial Sequence
  Description of Artificial Sequence: Synthetic oligonucleotide
cgcctataaactcgaactctaa

SEQ ID NO: 14031 - DNA, 16 bp, Artificial Sequence
  Description of Artificial Sequence: Synthetic oligonucleotide
gacgttcgcgagtttt

SEQ ID NO: 14032 - DNA, 20 bp, Artificial Sequence
  Description of Artificial Sequence: Synthetic oligonucleotide
ttaaatatcgaacgggattt

SEQ ID NO: 14033 - DNA, 23 bp, Artificial Sequence
  Description of Artificial Sequence: Synthetic oligonucleotide
atatcaaaatctacgcgatctaa

SEQ ID NO: 14034 - DNA, 20 bp, Artificial Sequence
  Description of Artificial Sequence: Synthetic oligonucleotide
aaactaaaaacgccgatacc

SEQ ID NO: 14035 - DNA, 19 bp, Artificial Sequence
  Description of Artificial Sequence: Synthetic oligonucleotide
ggttttattgacgcgattt

SEQ ID NO: 14036 - DNA, 18 bp, Artificial Sequence
  Description of Artificial Sequence: Synthetic oligonucleotide
ggtgcgcgtagagaataa

SEQ ID NO: 14037 - DNA, 21 bp, Artificial Sequence
  Description of Artificial Sequence: Synthetic oligonucleotide
tcaaaatctacgcgatctaaa

SEQ ID NO: 14038 - DNA, 22 bp, Artificial Sequence
  Description of Artificial Sequence: Synthetic oligonucleotide
acaaaactaaaaacgccgatac

SEQ ID NO: 14039 - DNA, 21 bp, Artificial Sequence
  Description of Artificial Sequence: Synthetic oligonucleotide
aaaactaaaaacgccgatacc

SEQ ID NO: 14040 - DNA, 19 bp, Artificial Sequence
  Description of Artificial Sequence: Synthetic oligonucleotide
gcgtgtttcgtttttattt

SEQ ID NO: 14041 - DNA, 22 bp, Artificial Sequence
  Description of Artificial Sequence: Synthetic oligonucleotide
aatatcaaaatctacgcgatct

SEQ ID NO: 14042 - DNA, 19 bp, Artificial Sequence
  Description of Artificial Sequence: Synthetic oligonucleotide
aactaaaaacgccgatacc

SEQ ID NO: 14043 - DNA, 20 bp, Artificial Sequence
  Description of Artificial Sequence: Synthetic oligonucleotide
atcggttcggagttagatta

SEQ ID NO: 14044 - DNA, 21 bp, Artificial Sequence
  Description of Artificial Sequence: Synthetic oligonucleotide
caaaactaaaaacgccgatac

SEQ ID NO: 14045 - DNA, 22 bp, Artificial Sequence
  Description of Artificial Sequence: Synthetic oligonucleotide
aaaatatacgaatcaaccgaac

SEQ ID NO: 14046 - DNA, 20 bp, Artificial Sequence
  Description of Artificial Sequence: Synthetic oligonucleotide
gaaagtcgcgttagtgaagt

SEQ ID NO: 14047 - DNA, 16 bp, Artificial Sequence
  Description of Artificial Sequence: Synthetic oligonucleotide
ttcgcgtttgacgggg

SEQ ID NO: 14048 - DNA, 21 bp, Artificial Sequence
  Description of Artificial Sequence: Synthetic oligonucleotide
agattgggttttttggtcgta

SEQ ID NO: 14049 - DNA, 22 bp, Artificial Sequence
  Description of Artificial Sequence: Synthetic oligonucleotide
atttttacgttttggaaagtcg

SEQ ID NO: 14050 - DNA, 20 bp, Artificial Sequence
  Description of Artificial Sequence: Synthetic oligonucleotide
ttttacgttttggaaagtcg

SEQ ID NO: 14051 - DNA, 22 bp, Artificial Sequence
  Description of Artificial Sequence: Synthetic oligonucleotide
atctaaactaacaccgaacgaa

SEQ ID NO: 14052 - DNA, 20 bp, Artificial Sequence
  Description of Artificial Sequence: Synthetic oligonucleotide
gaacgaggtacgtttttgag

SEQ ID NO: 14053 - DNA, 16 bp, Artificial Sequence
  Description of Artificial Sequence: Synthetic oligonucleotide
atcgagcgttcgcgta

SEQ ID NO: 14054 - DNA, 19 bp, Artificial Sequence
  Description of Artificial Sequence: Synthetic oligonucleotide
aggttttagattcgtacga

SEQ ID NO: 14055 - DNA, 20 bp, Artificial Sequence
  Description of Artificial Sequence: Synthetic oligonucleotide
agaacgaggtacgtttttga

SEQ ID NO: 14056 - DNA, 20 bp, Artificial Sequence
  Description of Artificial Sequence: Synthetic oligonucleotide
gagaacgaggtacgtttttg

SEQ ID NO: 14057 - DNA, 22 bp, Artificial Sequence
  Description of Artificial Sequence: Synthetic oligonucleotide
aaaaatatacgaatcaaccgaa

SEQ ID NO: 14058 - DNA, 22 bp, Artificial Sequence
  Description of Artificial Sequence: Synthetic oligonucleotide
taaaaatatacgaatcaaccga

SEQ ID NO: 14059 - DNA, 20 bp, Artificial Sequence
  Description of Artificial Sequence: Synthetic oligonucleotide
aaatcctactcgtacctccg

SEQ ID NO: 14060 - DNA, 22 bp, Artificial Sequence
  Description of Artificial Sequence: Synthetic oligonucleotide
taatagaaaaggtcggtatcgt

SEQ ID NO: 14061 - DNA, 16 bp, Artificial Sequence
  Description of Artificial Sequence: Synthetic oligonucleotide
ggacgcgcgcgtatta

SEQ ID NO: 14062 - DNA, 16 bp, Artificial Sequence
  Description of Artificial Sequence: Synthetic oligonucleotide
tattcggtcggggagg

SEQ ID NO: 14063 - DNA, 21 bp, Artificial Sequence
  Description of Artificial Sequence: Synthetic oligonucleotide
catctaaactaacaccgaacg

SEQ ID NO: 14064 - DNA, 21 bp, Artificial Sequence
  Description of Artificial Sequence: Synthetic oligonucleotide
tttttacgttttggaaagtcg

SEQ ID NO: 14065 - DNA, 21 bp, Artificial Sequence
  Description of Artificial Sequence: Synthetic oligonucleotide
ctaaactaacaccgaacgaaa

SEQ ID NO: 14066 - DNA, 21 bp, Artificial Sequence
  Description of Artificial Sequence: Synthetic oligonucleotide
tctaaactaacaccgaacgaa

SEQ ID NO: 14067 - DNA, 21 bp, Artificial Sequence
  Description of Artificial Sequence: Synthetic oligonucleotide
taaactaacaccgaacgaaaa

SEQ ID NO: 14068 - DNA, 19 bp, Artificial Sequence
  Description of Artificial Sequence: Synthetic oligonucleotide
cctactcgtacctccgaac

SEQ ID NO: 14069 - DNA, 19 bp, Artificial Sequence
  Description of Artificial Sequence: Synthetic oligonucleotide
cgaccaaaatcctactcgt

SEQ ID NO: 14070 - DNA, 23 bp, Artificial Sequence
  Description of Artificial Sequence: Synthetic oligonucleotide
ataaaaatatacgaatcaaccga

SEQ ID NO: 14071 - DNA, 21 bp, Artificial Sequence
  Description of Artificial Sequence: Synthetic oligonucleotide
atcctactcgtacctccgaac

SEQ ID NO: 14072 - DNA, 21 bp, Artificial Sequence
  Description of Artificial Sequence: Synthetic oligonucleotide
agaacgaggtacgtttttgag

SEQ ID NO: 14073 - DNA, 21 bp, Artificial Sequence
  Description of Artificial Sequence: Synthetic oligonucleotide
aaaatcctactcgtacctccg

SEQ ID NO: 14074 - DNA, 21 bp, Artificial Sequence
  Description of Artificial Sequence: Synthetic oligonucleotide
aactaacaccgaacgaaaaat

SEQ ID NO: 14075 - DNA, 17 bp, Artificial Sequence
  Description of Artificial Sequence: Synthetic oligonucleotide
ttcgcgtaggagttcgt

SEQ ID NO: 14076 - DNA, 19 bp, Artificial Sequence
  Description of Artificial Sequence: Synthetic oligonucleotide
tgcgaaatttgcggatcga

SEQ ID NO: 14077 - DNA, 20 bp, Artificial Sequence
  Description of Artificial Sequence: Synthetic oligonucleotide
aacgaggtacgtttttgagt

SEQ ID NO: 14078 - DNA, 22 bp, Artificial Sequence
  Description of Artificial Sequence: Synthetic oligonucleotide
aatcctactcgtacctccgaac

SEQ ID NO: 14079 - DNA, 23 bp, Artificial Sequence
  Description of Artificial Sequence: Synthetic oligonucleotide
cataaaaatatacgaatcaaccg

SEQ ID NO: 14080 - DNA, 21 bp, Artificial Sequence
  Description of Artificial Sequence: Synthetic oligonucleotide
aatatacgaatcaaccgaacc

SEQ ID NO: 14081 - DNA, 19 bp, Artificial Sequence
  Description of Artificial Sequence: Synthetic oligonucleotide
tcctactcgtacctccgaa

SEQ ID NO: 14082 - DNA, 21 bp, Artificial Sequence
  Description of Artificial Sequence: Synthetic oligonucleotide
actaacaccgaacgaaaaatc

SEQ ID NO: 14083 - DNA, 22 bp, Artificial Sequence
  Description of Artificial Sequence: Synthetic oligonucleotide
aaactaacaccgaacgaaaaat

SEQ ID NO: 14084 - DNA, 20 bp, Artificial Sequence
  Description of Artificial Sequence: Synthetic oligonucleotide
ctaacaccgaacgaaaaatc

SEQ ID NO: 14085 - DNA, 22 bp, Artificial Sequence
  Description of Artificial Sequence: Synthetic oligonucleotide
catctaaactaacaccgaacga

SEQ ID NO: 14086 - DNA, 19 bp, Artificial Sequence
  Description of Artificial Sequence: Synthetic oligonucleotide
tttacgttttggaaagtcg

SEQ ID NO: 14087 - DNA, 20 bp, Artificial Sequence
  Description of Artificial Sequence: Synthetic oligonucleotide
aaactaacaccgaacgaaaa

SEQ ID NO: 14088 - DNA, 19 bp, Artificial Sequence
  Description of Artificial Sequence: Synthetic oligonucleotide
tttggaaagtcgcgttagt

SEQ ID NO: 14089 - DNA, 21 bp, Artificial Sequence
  Description of Artificial Sequence: Synthetic oligonucleotide
gagaacgaggtacgtttttga

SEQ ID NO: 14090 - DNA, 18 bp, Artificial Sequence
  Description of Artificial Sequence: Synthetic oligonucleotide
tacgttttggaaagtcgc

SEQ ID NO: 14091 - DNA, 21 bp, Artificial Sequence
  Description of Artificial Sequence: Synthetic oligonucleotide
aatagaaaaggtcggtatcgt

SEQ ID NO: 14092 - DNA, 18 bp, Artificial Sequence
  Description of Artificial Sequence: Synthetic oligonucleotide
ggaaagtcgcgttagtga

SEQ ID NO: 14093 - DNA, 22 bp, Artificial Sequence
  Description of Artificial Sequence: Synthetic oligonucleotide
gagaacgaggtacgtttttgag

SEQ ID NO: 14094 - DNA, 22 bp, Artificial Sequence
  Description of Artificial Sequence: Synthetic oligonucleotide
aaatatacgaatcaaccgaacc

SEQ ID NO: 14095 - DNA, 23 bp, Artificial Sequence
  Description of Artificial Sequence: Synthetic oligonucleotide
taaaaatatacgaatcaaccgaa

SEQ ID NO: 14096 - DNA, 21 bp, Artificial Sequence
  Description of Artificial Sequence: Synthetic oligonucleotide
gttttggaaagtcgcgttagt

SEQ ID NO: 14097 - DNA, 18 bp, Artificial Sequence
  Description of Artificial Sequence: Synthetic oligonucleotide
ttttggaaagtcgcgtta

SEQ ID NO: 14098 - DNA, 19 bp, Artificial Sequence
  Description of Artificial Sequence: Synthetic oligonucleotide
ttacgttttggaaagtcgc

SEQ ID NO: 14099 - DNA, 22 bp, Artificial Sequence
  Description of Artificial Sequence: Synthetic oligonucleotide
gtgagaacgaggtacgtttttg

SEQ ID NO: 14100 - DNA, 22 bp, Artificial Sequence
  Description of Artificial Sequence: Synthetic oligonucleotide
ataaaaatatacgaatcaaccg

SEQ ID NO: 14101 - DNA, 18 bp, Artificial Sequence
  Description of Artificial Sequence: Synthetic oligonucleotide
tttggaaagtcgcgttag

SEQ ID NO: 14102 - DNA, 21 bp, Artificial Sequence
  Description of Artificial Sequence: Synthetic oligonucleotide
cgttagtgaagttcgtggttt

SEQ ID NO: 14103 - DNA, 21 bp, Artificial Sequence
  Description of Artificial Sequence: Synthetic oligonucleotide
tgagaacgaggtacgtttttg

SEQ ID NO: 14104 - DNA, 23 bp, Artificial Sequence
  Description of Artificial Sequence: Synthetic oligonucleotide
gtaatagaaaaggtcggtatcgt

SEQ ID NO: 14105 - DNA, 18 bp, Artificial Sequence
  Description of Artificial Sequence: Synthetic oligonucleotide
ttggaaagtcgcgttagt

SEQ ID NO: 14106 - DNA, 18 bp, Artificial Sequence
  Description of Artificial Sequence: Synthetic oligonucleotide
tggaaagtcgcgttagtg

SEQ ID NO: 14107 - DNA, 19 bp, Artificial Sequence
  Description of Artificial Sequence: Synthetic oligonucleotide
cgttagtgaagttcgtggt

SEQ ID NO: 14108 - DNA, 20 bp, Artificial Sequence
  Description of Artificial Sequence: Synthetic oligonucleotide
actaacaccgaacgaaaaat

SEQ ID NO: 14109 - DNA, 21 bp, Artificial Sequence
  Description of Artificial Sequence: Synthetic oligonucleotide
acgaccaaaatctaacctacg

SEQ ID NO: 14110 - DNA, 19 bp, Artificial Sequence
  Description of Artificial Sequence: Synthetic oligonucleotide
ttttaacggttttcggagt

SEQ ID NO: 14111 - DNA, 16 bp, Artificial Sequence
  Description of Artificial Sequence: Synthetic oligonucleotide
taaaggcggtcggcgt

SEQ ID NO: 14112 - DNA, 16 bp, Artificial Sequence
  Description of Artificial Sequence: Synthetic oligonucleotide
gggtggagaggggata

SEQ ID NO: 14113 - DNA, 20 bp, Artificial Sequence
  Description of Artificial Sequence: Synthetic oligonucleotide
cgaccaaaatctaacctacg

SEQ ID NO: 14114 - DNA, 20 bp, Artificial Sequence
  Description of Artificial Sequence: Synthetic oligonucleotide
acttcactaacgcgactttc

SEQ ID NO: 14115 - DNA, 20 bp, Artificial Sequence
  Description of Artificial Sequence: Synthetic oligonucleotide
agtttcgagcggtttttagt

SEQ ID NO: 14116 - DNA, 23 bp, Artificial Sequence
  Description of Artificial Sequence: Synthetic oligonucleotide
ttcgtgatttggtttcgaatcga

SEQ ID NO: 14117 - DNA, 21 bp, Artificial Sequence
  Description of Artificial Sequence: Synthetic oligonucleotide
tgtttatggtgatttttacgt

SEQ ID NO: 14118 - DNA, 20 bp, Artificial Sequence
  Description of Artificial Sequence: Synthetic oligonucleotide
gaacttcactaacgcgactt

SEQ ID NO: 14119 - DNA, 20 bp, Artificial Sequence
  Description of Artificial Sequence: Synthetic oligonucleotide
atggtgatttttacgttttg

SEQ ID NO: 14120 - DNA, 20 bp, Artificial Sequence
  Description of Artificial Sequence: Synthetic oligonucleotide
atatacgaatcaaccgaacc

SEQ ID NO: 14121 - DNA, 21 bp, Artificial Sequence
  Description of Artificial Sequence: Synthetic oligonucleotide
aacttcactaacgcgactttc

SEQ ID NO: 14122 - DNA, 22 bp, Artificial Sequence
  Description of Artificial Sequence: Synthetic oligonucleotide
cgaaactacgacgactacaaat

SEQ ID NO: 14123 - DNA, 18 bp, Artificial Sequence
  Description of Artificial Sequence: Synthetic oligonucleotide
gtttgtttagcgttgcgt

SEQ ID NO: 14124 - DNA, 16 bp, Artificial Sequence
  Description of Artificial Sequence: Synthetic oligonucleotide
ttttcgttcgcggagt

SEQ ID NO: 14125 - DNA, 19 bp, Artificial Sequence
  Description of Artificial Sequence: Synthetic oligonucleotide
gaatcgtttttcggttttg

SEQ ID NO: 14126 - DNA, 20 bp, Artificial Sequence
  Description of Artificial Sequence: Synthetic oligonucleotide
ggtgagaacgaggtacgttt

SEQ ID NO: 14127 - DNA, 19 bp, Artificial Sequence
  Description of Artificial Sequence: Synthetic oligonucleotide
ttaacggttttcggagttc

SEQ ID NO: 14128 - DNA, 16 bp, Artificial Sequence
  Description of Artificial Sequence: Synthetic oligonucleotide
gtggagaggggatagt

SEQ ID NO: 14129 - DNA, 16 bp, Artificial Sequence
  Description of Artificial Sequence: Synthetic oligonucleotide
ggtggagaggggatag

SEQ ID NO: 14130 - DNA, 19 bp, Artificial Sequence
  Description of Artificial Sequence: Synthetic oligonucleotide
cgcgcatctaaactaacac

SEQ ID NO: 14131 - DNA, 19 bp, Artificial Sequence
  Description of Artificial Sequence: Synthetic oligonucleotide
gattcgtacgatttttcgt

SEQ ID NO: 14132 - DNA, 19 bp, Artificial Sequence
  Description of Artificial Sequence: Synthetic oligonucleotide
aaagtcgcgttagtgaagt

SEQ ID NO: 14133 - DNA, 22 bp, Artificial Sequence
  Description of Artificial Sequence: Synthetic oligonucleotide
aacgaccaaaatctaacctacg

SEQ ID NO: 14134 - DNA, 22 bp, Artificial Sequence
  Description of Artificial Sequence: Synthetic oligonucleotide
agaacgaggtacgtttttgagt

SEQ ID NO: 14135 - DNA, 20 bp, Artificial Sequence
  Description of Artificial Sequence: Synthetic oligonucleotide
tttttaacggttttcggagt

SEQ ID NO: 14136 - DNA, 17 bp, Artificial Sequence
  Description of Artificial Sequence: Synthetic oligonucleotide
acgttttggaaagtcgc

SEQ ID NO: 14137 - DNA, 19 bp, Artificial Sequence
  Description of Artificial Sequence: Synthetic oligonucleotide
gtttcgagcggtttttagt

SEQ ID NO: 14138 - DNA, 20 bp, Artificial Sequence
  Description of Artificial Sequence: Synthetic oligonucleotide
aaccacgaacttcactaacg

SEQ ID NO: 14139 - DNA, 19 bp, Artificial Sequence
  Description of Artificial Sequence: Synthetic oligonucleotide
agtttcgagcggtttttag

SEQ ID NO: 14140 - DNA, 20 bp, Artificial Sequence
  Description of Artificial Sequence: Synthetic oligonucleotide
gcgttagtgaagttcgtggt

SEQ ID NO: 14141 - DNA, 21 bp, Artificial Sequence
  Description of Artificial Sequence: Synthetic oligonucleotide
atctaaactaacaccgaacga

SEQ ID NO: 14142 - DNA, 19 bp, Artificial Sequence
  Description of Artificial Sequence: Synthetic oligonucleotide
cgcatctaaactaacaccg

SEQ ID NO: 14143 - DNA, 20 bp, Artificial Sequence
  Description of Artificial Sequence: Synthetic oligonucleotide
cgcatctaaactaacaccga

SEQ ID NO: 14144 - DNA, 20 bp, Artificial Sequence
  Description of Artificial Sequence: Synthetic oligonucleotide
tttacgttttggaaagtcgc

SEQ ID NO: 14145 - DNA, 18 bp, Artificial Sequence
  Description of Artificial Sequence: Synthetic oligonucleotide
cgcgttagtgaagttcgt

SEQ ID NO: 14146 - DNA, 17 bp, Artificial Sequence
  Description of Artificial Sequence: Synthetic oligonucleotide
ggagaggggatagtagg

SEQ ID NO: 14147 - DNA, 19 bp, Artificial Sequence
  Description of Artificial Sequence: Synthetic oligonucleotide
caaacgtcgaacacaaaat

SEQ ID NO: 14148 - DNA, 20 bp, Artificial Sequence
  Description of Artificial Sequence: Synthetic oligonucleotide
acgtagggtcgaagtaggtt

SEQ ID NO: 14149 - DNA, 18 bp, Artificial Sequence
  Description of Artificial Sequence: Synthetic oligonucleotide
ttagattcgatcgcgatt

SEQ ID NO: 14150 - DNA, 16 bp, Artificial Sequence
  Description of Artificial Sequence: Synthetic oligonucleotide
agttggggacgtcggt

SEQ ID NO: 14151 - DNA, 22 bp, Artificial Sequence
  Description of Artificial Sequence: Synthetic oligonucleotide
ggcgtttagtcgtgtagtttta

SEQ ID NO: 14152 - DNA, 21 bp, Artificial Sequence
  Description of Artificial Sequence: Synthetic oligonucleotide
aataaattcgccttattcgat

SEQ ID NO: 14153 - DNA, 17 bp, Artificial Sequence
  Description of Artificial Sequence: Synthetic oligonucleotide
ttcgtaagggtcggcga

SEQ ID NO: 14154 - DNA, 21 bp, Artificial Sequence
  Description of Artificial Sequence: Synthetic oligonucleotide
tgggttttatcgtttttaatt

SEQ ID NO: 14155 - DNA, 22 bp, Artificial Sequence
  Description of Artificial Sequence: Synthetic oligonucleotide
gcgtttagtcgtgtagttttat

SEQ ID NO: 14156 - DNA, 22 bp, Artificial Sequence
  Description of Artificial Sequence: Synthetic oligonucleotide
aaataaattcgccttattcgat

SEQ ID NO: 14157 - DNA, 21 bp, Artificial Sequence
  Description of Artificial Sequence: Synthetic oligonucleotide
gaatagtcgaggagtcgttgt

SEQ ID NO: 14158 - DNA, 21 bp, Artificial Sequence
  Description of Artificial Sequence: Synthetic oligonucleotide
tcaatcaaaaacgaacgataa

SEQ ID NO: 14159 - DNA, 21 bp, Artificial Sequence
  Description of Artificial Sequence: Synthetic oligonucleotide
gtcgttggatttagtcgtcgt

SEQ ID NO: 14160 - DNA, 17 bp, Artificial Sequence
  Description of Artificial Sequence: Synthetic oligonucleotide
gtaatgaggagaggagt

SEQ ID NO: 14161 - DNA, 20 bp, Artificial Sequence
  Description of Artificial Sequence: Synthetic oligonucleotide
acggtagtgagagtcgattg

SEQ ID NO: 14162 - DNA, 22 bp, Artificial Sequence
  Description of Artificial Sequence: Synthetic oligonucleotide
cgtctataaaacgctatctcat

SEQ ID NO: 14163 - DNA, 16 bp, Artificial Sequence
  Description of Artificial Sequence: Synthetic oligonucleotide
gtcgcgagtttcgggt

SEQ ID NO: 14164 - DNA, 20 bp, Artificial Sequence
  Description of Artificial Sequence: Synthetic oligonucleotide
tagcgtttaagttttaggtt

SEQ ID NO: 14165 - DNA, 23 bp, Artificial Sequence
  Description of Artificial Sequence: Synthetic oligonucleotide
acgtctataaaacgctatctcat

SEQ ID NO: 14166 - DNA, 19 bp, Artificial Sequence
  Description of Artificial Sequence: Synthetic oligonucleotide
cgggaggagtcgtaaataa

SEQ ID NO: 14167 - DNA, 22 bp, Artificial Sequence
  Description of Artificial Sequence: Synthetic oligonucleotide
gcgtaacaaacgtctaaaaatc

SEQ ID NO: 14168 - DNA, 16 bp, Artificial Sequence
  Description of Artificial Sequence: Synthetic oligonucleotide
tagtcgaagcgggcga

SEQ ID NO: 14169 - DNA, 21 bp, Artificial Sequence
  Description of Artificial Sequence: Synthetic oligonucleotide
ttcgtgattggtttcgttcgg

SEQ ID NO: 14170 - DNA, 22 bp, Artificial Sequence
  Description of Artificial Sequence: Synthetic oligonucleotide
gtaacaaacgtctaaaaatcgc

SEQ ID NO: 14171 - DNA, 20 bp, Artificial Sequence
  Description of Artificial Sequence: Synthetic oligonucleotide
gttgcgtagatagcgttttt

SEQ ID NO: 14172 - DNA, 20 bp, Artificial Sequence
  Description of Artificial Sequence: Synthetic oligonucleotide
tatcacttaacccgaacgac

SEQ ID NO: 14173 - DNA, 20 bp, Artificial Sequence
  Description of Artificial Sequence: Synthetic oligonucleotide
atgcgggtttgtgtcgtcgt

SEQ ID NO: 14174 - DNA, 19 bp, Artificial Sequence
  Description of Artificial Sequence: Synthetic oligonucleotide
gagtagtttttgattcggg

SEQ ID NO: 14175 - DNA, 21 bp, Artificial Sequence
  Description of Artificial Sequence: Synthetic oligonucleotide
cgaataaggcgaatttatttt

SEQ ID NO: 14176 - DNA, 20 bp, Artificial Sequence
  Description of Artificial Sequence: Synthetic oligonucleotide
cgtttatttacgactcctcc

SEQ ID NO: 14177 - DNA, 19 bp, Artificial Sequence
  Description of Artificial Sequence: Synthetic oligonucleotide
ttcgttcggttattttcgg

SEQ ID NO: 14178 - DNA, 22 bp, Artificial Sequence
  Description of Artificial Sequence: Synthetic oligonucleotide
attggttttttaggttgatcgg

SEQ ID NO: 14179 - DNA, 21 bp, Artificial Sequence
  Description of Artificial Sequence: Synthetic oligonucleotide
taacaaacgtctaaaaatcgc

SEQ ID NO: 14180 - DNA, 24 bp, Artificial Sequence
  Description of Artificial Sequence: Synthetic oligonucleotide
aaaaacgtctataaaacgctatct

SEQ ID NO: 14181 - DNA, 22 bp, Artificial Sequence
  Description of Artificial Sequence: Synthetic oligonucleotide
gtttaagttttaggttaatgag

SEQ ID NO: 14182 - DNA, 20 bp, Artificial Sequence
  Description of Artificial Sequence: Synthetic oligonucleotide
tttatcacttaacccgaacg

SEQ ID NO: 14183 - DNA, 22 bp, Artificial Sequence
  Description of Artificial Sequence: Synthetic oligonucleotide
gtagtgagagtcgattggtcgt

SEQ ID NO: 14184 - DNA, 23 bp, Artificial Sequence
  Description of Artificial Sequence: Synthetic oligonucleotide
cgtctataaaacgctatctcatt

SEQ ID NO: 14185 - DNA, 23 bp, Artificial Sequence
  Description of Artificial Sequence: Synthetic oligonucleotide
aaaacgtctataaaacgctatct

SEQ ID NO: 14186 - DNA, 23 bp, Artificial Sequence
  Description of Artificial Sequence: Synthetic oligonucleotide
aacgtctataaaacgctatctca

SEQ ID NO: 14187 - DNA, 21 bp, Artificial Sequence
  Description of Artificial Sequence: Synthetic oligonucleotide
tagtgagagtcgattggtcgt

SEQ ID NO: 14188 - DNA, 22 bp, Artificial Sequence
  Description of Artificial Sequence: Synthetic oligonucleotide
acgtctataaaacgctatctca

SEQ ID NO: 14189 - DNA, 21 bp, Artificial Sequence
  Description of Artificial Sequence: Synthetic oligonucleotide
ctttatcacttaacccgaacg

SEQ ID NO: 14190 - DNA, 19 bp, Artificial Sequence
  Description of Artificial Sequence: Synthetic oligonucleotide
tcgggaggagtcgtaaata

SEQ ID NO: 14191 - DNA, 19 bp, Artificial Sequence
  Description of Artificial Sequence: Synthetic oligonucleotide
ttatttacgactcctcccg

SEQ ID NO: 14192 - DNA, 22 bp, Artificial Sequence
  Description of Artificial Sequence: Synthetic oligonucleotide
tcgtgtagttttattagcgttt

SEQ ID NO: 14193 - DNA, 20 bp, Artificial Sequence
  Description of Artificial Sequence: Synthetic oligonucleotide
ataaattcgccttattcgat

SEQ ID NO: 14194 - DNA, 20 bp, Artificial Sequence
  Description of Artificial Sequence: Synthetic oligonucleotide
ggaatagtcgaggagtcgtt

SEQ ID NO: 14195 - DNA, 23 bp, Artificial Sequence
  Description of Artificial Sequence: Synthetic oligonucleotide
gtcgtgtagttttattagcgttt

SEQ ID NO: 14196 - DNA, 23 bp, Artificial Sequence
  Description of Artificial Sequence: Synthetic oligonucleotide
gcgtttagtcgtgtagttttatt

SEQ ID NO: 14197 - DNA, 21 bp, Artificial Sequence
  Description of Artificial Sequence: Synthetic oligonucleotide
ttatcacttaacccgaacgac

SEQ ID NO: 14198 - DNA, 24 bp, Artificial Sequence
  Description of Artificial Sequence: Synthetic oligonucleotide
aacgtctataaaacgctatctcat

SEQ ID NO: 14199 - DNA, 20 bp, Artificial Sequence
  Description of Artificial Sequence: Synthetic oligonucleotide
caatcaaaaacgaacgataa

SEQ ID NO: 14200 - DNA, 22 bp, Artificial Sequence
  Description of Artificial Sequence: Synthetic oligonucleotide
tcgaataaggcgaatttatttt

SEQ ID NO: 14201 - DNA, 20 bp, Artificial Sequence
  Description of Artificial Sequence: Synthetic oligonucleotide
aatagtcgaggagtcgttgt

SEQ ID NO: 14202 - DNA, 22 bp, Artificial Sequence
  Description of Artificial Sequence: Synthetic oligonucleotide
cgtaacaaacgtctaaaaatcg

SEQ ID NO: 14203 - DNA, 22 bp, Artificial Sequence
  Description of Artificial Sequence: Synthetic oligonucleotide
aaacgtctataaaacgctatct

SEQ ID NO: 14204 - DNA, 22 bp, Artificial Sequence
  Description of Artificial Sequence: Synthetic oligonucleotide
acgtatagattgatcgagtggt

SEQ ID NO: 14205 - DNA, 21 bp, Artificial Sequence
  Description of Artificial Sequence: Synthetic oligonucleotide
aaaataatcgtaacctacgcc

SEQ ID NO: 14206 - DNA, 23 bp, Artificial Sequence
  Description of Artificial Sequence: Synthetic oligonucleotide
tttcgtcgttataattagagcga

SEQ ID NO: 14207 - DNA, 17 bp, Artificial Sequence
  Description of Artificial Sequence: Synthetic oligonucleotide
tggtgagtgaattcggt

SEQ ID NO: 14208 - DNA, 22 bp, Artificial Sequence
  Description of Artificial Sequence: Synthetic oligonucleotide
aaaaataatcgtaacctacgcc

SEQ ID NO: 14209 - DNA, 17 bp, Artificial Sequence
  Description of Artificial Sequence: Synthetic oligonucleotide
tgagtgaattcggtcgg

SEQ ID NO: 14210 - DNA, 22 bp, Artificial Sequence
  Description of Artificial Sequence: Synthetic oligonucleotide
aacgtatagattgatcgagtgg

SEQ ID NO: 14211 - DNA, 22 bp, Artificial Sequence
  Description of Artificial Sequence: Synthetic oligonucleotide
tattttagtatcgttgtgtcgc

SEQ ID NO: 14212 - DNA, 20 bp, Artificial Sequence
  Description of Artificial Sequence: Synthetic oligonucleotide
tatcgaaccgcaaaaattac

SEQ ID NO: 14213 - DNA, 25 bp, Artificial Sequence
  Description of Artificial Sequence: Synthetic oligonucleotide
tttgttatattgttgtggagtatgt

SEQ ID NO: 14214 - DNA, 16 bp, Artificial Sequence
  Description of Artificial Sequence: Synthetic oligonucleotide
gttcggtcgcggggag

SEQ ID NO: 14215 - DNA, 21 bp, Artificial Sequence
  Description of Artificial Sequence: Synthetic oligonucleotide
ctatcgaaccgcaaaaattac

SEQ ID NO: 14216 - DNA, 21 bp, Artificial Sequence
  Description of Artificial Sequence: Synthetic oligonucleotide
cgtatagattgatcgagtggt

SEQ ID NO: 14217 - DNA, 23 bp, Artificial Sequence
  Description of Artificial Sequence: Synthetic oligonucleotide
ttaacgtatagattgatcgagtg

SEQ ID NO: 14218 - DNA, 21 bp, Artificial Sequence
  Description of Artificial Sequence: Synthetic oligonucleotide
cgaatccgaaaactctaaaaa

SEQ ID NO: 14219 - DNA, 20 bp, Artificial Sequence
  Description of Artificial Sequence: Synthetic oligonucleotide
gttgggggtgtaggttatga

SEQ ID NO: 14220 - DNA, 17 bp, Artificial Sequence
  Description of Artificial Sequence: Synthetic oligonucleotide
gaggttggtgagtgaat

SEQ ID NO: 14221 - DNA, 20 bp, Artificial Sequence
  Description of Artificial Sequence: Synthetic oligonucleotide
aataatcgtaacctacgccc

SEQ ID NO: 14222 - DNA, 16 bp, Artificial Sequence
  Description of Artificial Sequence: Synthetic oligonucleotide
agtgaattcggtcggg

SEQ ID NO: 14223 - DNA, 23 bp, Artificial Sequence
  Description of Artificial Sequence: Synthetic oligonucleotide
taacgtatagattgatcgagtgg

SEQ ID NO: 14224 - DNA, 19 bp, Artificial Sequence
  Description of Artificial Sequence: Synthetic oligonucleotide
atcgaaccgcaaaaattac

SEQ ID NO: 14225 - DNA, 21 bp, Artificial Sequence
  Description of Artificial Sequence: Synthetic oligonucleotide
aaataatcgtaacctacgccc

SEQ ID NO: 14226 - DNA, 21 bp, Artificial Sequence
  Description of Artificial Sequence: Synthetic oligonucleotide
aggaatttgtttcgtcgttat

SEQ ID NO: 14227 - DNA, 20 bp, Artificial Sequence
  Description of Artificial Sequence: Synthetic oligonucleotide
cgaatccgaaaactctaaaa

SEQ ID NO: 14228 - DNA, 22 bp, Artificial Sequence
  Description of Artificial Sequence: Synthetic oligonucleotide
cgtatagattgatcgagtggtt

SEQ ID NO: 14229 - DNA, 21 bp, Artificial Sequence
  Description of Artificial Sequence: Synthetic oligonucleotide
attttagtatcgttgtgtcgc

SEQ ID NO: 14230 - DNA, 21 bp, Artificial Sequence
  Description of Artificial Sequence: Synthetic oligonucleotide
acgtatagattgatcgagtgg

SEQ ID NO: 14231 - DNA, 19 bp, Artificial Sequence
  Description of Artificial Sequence: Synthetic oligonucleotide
ataatcgtaacctacgccc

SEQ ID NO: 14232 - DNA, 18 bp, Artificial Sequence
  Description of Artificial Sequence: Synthetic oligonucleotide
gttggtgagtgaattcgg

SEQ ID NO: 14233 - DNA, 23 bp, Artificial Sequence
  Description of Artificial Sequence: Synthetic oligonucleotide
ggtattttagtatcgttgtgtcg

SEQ ID NO: 14234 - DNA, 16 bp, Artificial Sequence
  Description of Artificial Sequence: Synthetic oligonucleotide
ggttcggtcgcgggga

SEQ ID NO: 14235 - DNA, 21 bp, Artificial Sequence
  Description of Artificial Sequence: Synthetic oligonucleotide
ggcgtaggttacgattatttt

SEQ ID NO: 14236 - DNA, 20 bp, Artificial Sequence
  Description of Artificial Sequence: Synthetic oligonucleotide
atctaaacgaatcccgctac

SEQ ID NO: 14237 - DNA, 16 bp, Artificial Sequence
  Description of Artificial Sequence: Synthetic oligonucleotide
ttacggatcgttcggg

SEQ ID NO: 14238 - DNA, 19 bp, Artificial Sequence
  Description of Artificial Sequence: Synthetic oligonucleotide
tagagttttcggattcgaa

SEQ ID NO: 14239 - DNA, 23 bp, Artificial Sequence
  Description of Artificial Sequence: Synthetic oligonucleotide
gtattttagtatcgttgtgtcgc

SEQ ID NO: 14240 - DNA, 18 bp, Artificial Sequence
  Description of Artificial Sequence: Synthetic oligonucleotide
tcgaaccgcaaaaattac

SEQ ID NO: 14241 - DNA, 22 bp, Artificial Sequence
  Description of Artificial Sequence: Synthetic oligonucleotide
gaggaatttgtttcgtcgttat

SEQ ID NO: 14242 - DNA, 19 bp, Artificial Sequence
  Description of Artificial Sequence: Synthetic oligonucleotide
tctaaacgaatcccgctac

SEQ ID NO: 14243 - DNA, 20 bp, Artificial Sequence
  Description of Artificial Sequence: Synthetic oligonucleotide
ggaatttgtttcgtcgttat

SEQ ID NO: 14244 - DNA, 22 bp, Artificial Sequence
  Description of Artificial Sequence: Synthetic oligonucleotide
ggcgtaggttacgattattttt

SEQ ID NO: 14245 - DNA, 20 bp, Artificial Sequence
  Description of Artificial Sequence: Synthetic oligonucleotide
aatctaaacgaatcccgcta

SEQ ID NO: 14246 - DNA, 22 bp, Artificial Sequence
  Description of Artificial Sequence: Synthetic oligonucleotide
gctatcgaaccgcaaaaattac

SEQ ID NO: 14247 - DNA, 18 bp, Artificial Sequence
  Description of Artificial Sequence: Synthetic oligonucleotide
cgactccatcctcgaaat

SEQ ID NO: 14248 - DNA, 21 bp, Artificial Sequence
  Description of Artificial Sequence: Synthetic oligonucleotide
tacgtaatttttgcggttcga

SEQ ID NO: 14249 - DNA, 25 bp, Artificial Sequence
  Description of Artificial Sequence: Synthetic oligonucleotide
ttcgttatatcgtcgtggagtacgt

SEQ ID NO: 14250 - DNA, 18 bp, Artificial Sequence
  Description of Artificial Sequence: Synthetic oligonucleotide
gatttagggagtcgcgtt

SEQ ID NO: 14251 - DNA, 21 bp, Artificial Sequence
  Description of Artificial Sequence: Synthetic oligonucleotide
acgtactccacgacgatataa

SEQ ID NO: 14252 - DNA, 17 bp, Artificial Sequence
  Description of Artificial Sequence: Synthetic oligonucleotide
gtcgcggggagtttcgt

SEQ ID NO: 14253 - DNA, 16 bp, Artificial Sequence
  Description of Artificial Sequence: Synthetic oligonucleotide
atcgttgtgtcgcggt

SEQ ID NO: 14254 - DNA, 18 bp, Artificial Sequence
  Description of Artificial Sequence: Synthetic oligonucleotide
atttagggagtcgcgttc

SEQ ID NO: 14255 - DNA, 20 bp, Artificial Sequence
  Description of Artificial Sequence: Synthetic oligonucleotide
ttttagtatcgttgtgtcgc

SEQ ID NO: 14256 - DNA, 21 bp, Artificial Sequence
  Description of Artificial Sequence: Synthetic oligonucleotide
gcgtaggttacgattattttt

SEQ ID NO: 14257 - DNA, 20 bp, Artificial Sequence
  Description of Artificial Sequence: Synthetic oligonucleotide
gggcgtaggttacgattatt

SEQ ID NO: 14258 - DNA, 19 bp, Artificial Sequence
  Description of Artificial Sequence: Synthetic oligonucleotide
ttattcgttacggatcgtt

SEQ ID NO: 14259 - DNA, 20 bp, Artificial Sequence
  Description of Artificial Sequence: Synthetic oligonucleotide
ggttttttagagttttcgga

SEQ ID NO: 14260 - DNA, 20 bp, Artificial Sequence
  Description of Artificial Sequence: Synthetic oligonucleotide
cgtatagattgatcgagtgg

SEQ ID NO: 14261 - DNA, 24 bp, Artificial Sequence
  Description of Artificial Sequence: Synthetic oligonucleotide
aggtattttagtatcgttgtgtcg

SEQ ID NO: 14262 - DNA, 18 bp, Artificial Sequence
  Description of Artificial Sequence: Synthetic oligonucleotide
acgtaatttttgcggttc

SEQ ID NO: 14263 - DNA, 22 bp, Artificial Sequence
  Description of Artificial Sequence: Synthetic oligonucleotide
aaccactcgatcaatctatacg

SEQ ID NO: 14264 - DNA, 16 bp, Artificial Sequence
  Description of Artificial Sequence: Synthetic oligonucleotide
tagcgacgtcgcgatt

SEQ ID NO: 14265 - DNA, 16 bp, Artificial Sequence
  Description of Artificial Sequence: Synthetic oligonucleotide
gggtggagtaagaggg

SEQ ID NO: 14266 - DNA, 21 bp, Artificial Sequence
  Description of Artificial Sequence: Synthetic oligonucleotide
aatctaaacgaatcccgctac

SEQ ID NO: 14267 - DNA, 22 bp, Artificial Sequence
  Description of Artificial Sequence: Synthetic oligonucleotide
taacgtatagattgatcgagtg

SEQ ID NO: 14268 - DNA, 17 bp, Artificial Sequence
  Description of Artificial Sequence: Synthetic oligonucleotide
tttagggagtcgcgttc

SEQ ID NO: 14269 - DNA, 16 bp, Artificial Sequence
  Description of Artificial Sequence: Synthetic oligonucleotide
ggttcgacggacgttt

SEQ ID NO: 14270 - DNA, 22 bp, Artificial Sequence
  Description of Artificial Sequence: Synthetic oligonucleotide
acgctaaataatctaaaccacg

SEQ ID NO: 14271 - DNA, 17 bp, Artificial Sequence
  Description of Artificial Sequence: Synthetic oligonucleotide
atcgcggcggatatcgt

SEQ ID NO: 14272 - DNA, 24 bp, Artificial Sequence
  Description of Artificial Sequence: Synthetic oligonucleotide
ttcgcgggtattattagtacgcgt

SEQ ID NO: 14273 - DNA, 16 bp, Artificial Sequence
  Description of Artificial Sequence: Synthetic oligonucleotide
atatggggttcgacgg

SEQ ID NO: 14274 - DNA, 21 bp, Artificial Sequence
  Description of Artificial Sequence: Synthetic oligonucleotide
gtaggatttagggagtcgcgt

SEQ ID NO: 14275 - DNA, 16 bp, Artificial Sequence
  Description of Artificial Sequence: Synthetic oligonucleotide
ttcggtcgcggggagt

SEQ ID NO: 14276 - DNA, 21 bp, Artificial Sequence
  Description of Artificial Sequence: Synthetic oligonucleotide
ttgaggtattttagtatcgtt

SEQ ID NO: 14277 - DNA, 16 bp, Artificial Sequence
  Description of Artificial Sequence: Synthetic oligonucleotide
gtgaggggttcgttcg

SEQ ID NO: 14278 - DNA, 22 bp, Artificial Sequence
  Description of Artificial Sequence: Synthetic oligonucleotide
gcgacacaacgatactaaaata

SEQ ID NO: 14279 - DNA, 16 bp, Artificial Sequence
  Description of Artificial Sequence: Synthetic oligonucleotide
ggagtcgcgttcggag

SEQ ID NO: 14280 - DNA, 17 bp, Artificial Sequence
  Description of Artificial Sequence: Synthetic oligonucleotide
tgggggcgtaggattta

SEQ ID NO: 14281 - DNA, 22 bp, Artificial Sequence
  Description of Artificial Sequence: Synthetic oligonucleotide
tgaggaatttgtttcgtcgtta

SEQ ID NO: 14282 - DNA, 18 bp, Artificial Sequence
  Description of Artificial Sequence: Synthetic oligonucleotide
ctaaacgaatcccgctac

SEQ ID NO: 14283 - DNA, 21 bp, Artificial Sequence
  Description of Artificial Sequence: Synthetic oligonucleotide
accactcgatcaatctatacg

SEQ ID NO: 14284 - DNA, 20 bp, Artificial Sequence
  Description of Artificial Sequence: Synthetic oligonucleotide
taggatttagggagtcgcgt

SEQ ID NO: 14285 - DNA, 18 bp, Artificial Sequence
  Description of Artificial Sequence: Synthetic oligonucleotide
taatcgtaacctacgccc

SEQ ID NO: 14286 - DNA, 17 bp, Artificial Sequence
  Description of Artificial Sequence: Synthetic oligonucleotide
gttcgacggacgttttt

SEQ ID NO: 14287 - DNA, 22 bp, Artificial Sequence
  Description of Artificial Sequence: Synthetic oligonucleotide
cgctaaataatctaaaccacga

SEQ ID NO: 14288 - DNA, 19 bp, Artificial Sequence
  Description of Artificial Sequence: Synthetic oligonucleotide
gtacgacggtaaggattat

SEQ ID NO: 14289 - DNA, 20 bp, Artificial Sequence
  Description of Artificial Sequence: Synthetic oligonucleotide
ggcgtaggttacgattattt

SEQ ID NO: 14290 - DNA, 22 bp, Artificial Sequence
  Description of Artificial Sequence: Synthetic oligonucleotide
aaatctaaacgaatcccgctac

SEQ ID NO: 14291 - DNA, 16 bp, Artificial Sequence
  Description of Artificial Sequence: Synthetic oligonucleotide
ccatcctcgaaatcgc

SEQ ID NO: 14292 - DNA, 17 bp, Artificial Sequence
  Description of Artificial Sequence: Synthetic oligonucleotide
agtgaggggttcgttcg

SEQ ID NO: 14293 - DNA, 22 bp, Artificial Sequence
  Description of Artificial Sequence: Synthetic oligonucleotide
aataactacgacataaaacccg

SEQ ID NO: 14294 - DNA, 20 bp, Artificial Sequence
  Description of Artificial Sequence: Synthetic oligonucleotide
atttgagttacggtgttcgt

SEQ ID NO: 14295 - DNA, 16 bp, Artificial Sequence
  Description of Artificial Sequence: Synthetic oligonucleotide
gtcgtacgcgtgttgg

SEQ ID NO: 14296 - DNA, 21 bp, Artificial Sequence
  Description of Artificial Sequence: Synthetic oligonucleotide
ttagggagatgtaatttttgt

SEQ ID NO: 14297 - DNA, 22 bp, Artificial Sequence
  Description of Artificial Sequence: Synthetic oligonucleotide
ataactacgacataaaacccga

SEQ ID NO: 14298 - DNA, 21 bp, Artificial Sequence
  Description of Artificial Sequence: Synthetic oligonucleotide
gatttgagttacggtgttcgt

SEQ ID NO: 14299 - DNA, 22 bp, Artificial Sequence
  Description of Artificial Sequence: Synthetic oligonucleotide
taactacgacataaaacccgac

SEQ ID NO: 14300 - DNA, 19 bp, Artificial Sequence
  Description of Artificial Sequence: Synthetic oligonucleotide
tttgagttacggtgttcgt

SEQ ID NO: 14301 - DNA, 21 bp, Artificial Sequence
  Description of Artificial Sequence: Synthetic oligonucleotide
aactacgacataaaacccgac

SEQ ID NO: 14302 - DNA, 22 bp, Artificial Sequence
  Description of Artificial Sequence: Synthetic oligonucleotide
tgatttgagttacggtgttcgt

SEQ ID NO: 14303 - DNA, 22 bp, Artificial Sequence
  Description of Artificial Sequence: Synthetic oligonucleotide
gtgatttgagttacggtgttcg

SEQ ID NO: 14304 - DNA, 23 bp, Artificial Sequence
  Description of Artificial Sequence: Synthetic oligonucleotide
aaataactacgacataaaacccg

SEQ ID NO: 14305 - DNA, 20 bp, Artificial Sequence
  Description of Artificial Sequence: Synthetic oligonucleotide
actacgacataaaacccgac

SEQ ID NO: 14306 - DNA, 22 bp, Artificial Sequence
  Description of Artificial Sequence: Synthetic oligonucleotide
ctacgaaaaccgactaaaatct

SEQ ID NO: 14307 - DNA, 18 bp, Artificial Sequence
  Description of Artificial Sequence: Synthetic oligonucleotide
cgcgtgttggtgatattc

SEQ ID NO: 14308 - DNA, 16 bp, Artificial Sequence
  Description of Artificial Sequence: Synthetic oligonucleotide
ggaggcgttcgtcggg

SEQ ID NO: 14309 - DNA, 25 bp, Artificial Sequence
  Description of Artificial Sequence: Synthetic oligonucleotide
tgtcgtagttatttattttttggag

SEQ ID NO: 14310 - DNA, 18 bp, Artificial Sequence
  Description of Artificial Sequence: Synthetic oligonucleotide
cgtgttggtgatattcgc

SEQ ID NO: 14311 - DNA, 16 bp, Artificial Sequence
  Description of Artificial Sequence: Synthetic oligonucleotide
aggcgttcgtcgggtt

SEQ ID NO: 14312 - DNA, 22 bp, Artificial Sequence
  Description of Artificial Sequence: Synthetic oligonucleotide
acgaaactaataaataaacccg

SEQ ID NO: 14313 - DNA, 17 bp, Artificial Sequence
  Description of Artificial Sequence: Synthetic oligonucleotide
cggattcggagattttg

SEQ ID NO: 14314 - DNA, 16 bp, Artificial Sequence
  Description of Artificial Sequence: Synthetic oligonucleotide
ggcggttcgtggcgga

SEQ ID NO: 14315 - DNA, 20 bp, Artificial Sequence
  Description of Artificial Sequence: Synthetic oligonucleotide
gtcgtgatttgcgttttcgg

SEQ ID NO: 14316 - DNA, 20 bp, Artificial Sequence
  Description of Artificial Sequence: Synthetic oligonucleotide
aattcctacgattcgacaac

SEQ ID NO: 14317 - DNA, 20 bp, Artificial Sequence
  Description of Artificial Sequence: Synthetic oligonucleotide
tattcggttagtttgtgcgt

SEQ ID NO: 14318 - DNA, 17 bp, Artificial Sequence
  Description of Artificial Sequence: Synthetic oligonucleotide
tattttcggaatcgcgg

SEQ ID NO: 14319 - DNA, 22 bp, Artificial Sequence
  Description of Artificial Sequence: Synthetic oligonucleotide
gtttatttttaatattgcggtt

SEQ ID NO: 14320 - DNA, 22 bp, Artificial Sequence
  Description of Artificial Sequence: Synthetic oligonucleotide
aaactaactacgaaaaccgact

SEQ ID NO: 14321 - DNA, 20 bp, Artificial Sequence
  Description of Artificial Sequence: Synthetic oligonucleotide
attttttggagggtgtgaga

SEQ ID NO: 14322 - DNA, 24 bp, Artificial Sequence
  Description of Artificial Sequence: Synthetic oligonucleotide
taaataactacgacataaaacccg

SEQ ID NO: 14323 - DNA, 22 bp, Artificial Sequence
  Description of Artificial Sequence: Synthetic oligonucleotide
gttattcggttagtttgtgcgt

SEQ ID NO: 14324 - DNA, 21 bp, Artificial Sequence
  Description of Artificial Sequence: Synthetic oligonucleotide
actaataaataaacccgaccg

SEQ ID NO: 14325 - DNA, 18 bp, Artificial Sequence
  Description of Artificial Sequence: Synthetic oligonucleotide
cgttgtttcggggtagat

SEQ ID NO: 14326 - DNA, 18 bp, Artificial Sequence
  Description of Artificial Sequence: Synthetic oligonucleotide
attcggagattttgaggg

SEQ ID NO: 14327 - DNA, 21 bp, Artificial Sequence
  Description of Artificial Sequence: Synthetic oligonucleotide
ttattcggttagtttgtgcgt

SEQ ID NO: 14328 - DNA, 21 bp, Artificial Sequence
  Description of Artificial Sequence: Synthetic oligonucleotide
caattcctacgattcgacaac

SEQ ID NO: 14329 - DNA, 22 bp, Artificial Sequence
  Description of Artificial Sequence: Synthetic oligonucleotide
aactaataaataaacccgaccg

SEQ ID NO: 14330 - DNA, 19 bp, Artificial Sequence
  Description of Artificial Sequence: Synthetic oligonucleotide
attcggttagtttgtgcgt

SEQ ID NO: 14331 - DNA, 23 bp, Artificial Sequence
  Description of Artificial Sequence: Synthetic oligonucleotide
actacgaaaaccgactaaaatct

SEQ ID NO: 14332 - DNA, 18 bp, Artificial Sequence
  Description of Artificial Sequence: Synthetic oligonucleotide
ggcgttcgtcgggtttta

SEQ ID NO: 14333 - DNA, 25 bp, Artificial Sequence
  Description of Artificial Sequence: Synthetic oligonucleotide
gtcgtagttatttattttttggagg

SEQ ID NO: 14334 - DNA, 17 bp, Artificial Sequence
  Description of Artificial Sequence: Synthetic oligonucleotide
tcgttgtttcggggtag

SEQ ID NO: 14335 - DNA, 16 bp, Artificial Sequence
  Description of Artificial Sequence: Synthetic oligonucleotide
attcgggcggttcgtg

SEQ ID NO: 14336 - DNA, 19 bp, Artificial Sequence
  Description of Artificial Sequence: Synthetic oligonucleotide
ggattcggagattttgagg

SEQ ID NO: 14337 - DNA, 22 bp, Artificial Sequence
  Description of Artificial Sequence: Synthetic oligonucleotide
gaaactaactacgaaaaccgac

SEQ ID NO: 14338 - DNA, 17 bp, Artificial Sequence
  Description of Artificial Sequence: Synthetic oligonucleotide
tggtgatattcgcggag

SEQ ID NO: 14339 - DNA, 20 bp, Artificial Sequence
  Description of Artificial Sequence: Synthetic oligonucleotide
ttcgtcgggttttatgtcgt

SEQ ID NO: 14340 - DNA, 18 bp, Artificial Sequence
  Description of Artificial Sequence: Synthetic oligonucleotide
tcggattcggagattttg

SEQ ID NO: 14341 - DNA, 17 bp, Artificial Sequence
  Description of Artificial Sequence: Synthetic oligonucleotide
gttggtgatattcgcgg

SEQ ID NO: 14342 - DNA, 19 bp, Artificial Sequence
  Description of Artificial Sequence: Synthetic oligonucleotide
gcaattcctacgattcgac

SEQ ID NO: 14343 - DNA, 19 bp, Artificial Sequence
  Description of Artificial Sequence: Synthetic oligonucleotide
tttggaattgtggtgttgt

SEQ ID NO: 14344 - DNA, 22 bp, Artificial Sequence
  Description of Artificial Sequence: Synthetic oligonucleotide
gtaaacgacacgcaattcctac

SEQ ID NO: 14345 - DNA, 19 bp, Artificial Sequence
  Description of Artificial Sequence: Synthetic oligonucleotide
tattcggttagtttgtgcg

SEQ ID NO: 14346 - DNA, 21 bp, Artificial Sequence
  Description of Artificial Sequence: Synthetic oligonucleotide
ataactacgacataaaacccg

SEQ ID NO: 14347 - DNA, 23 bp, Artificial Sequence
  Description of Artificial Sequence: Synthetic oligonucleotide
gaaactaactacgaaaaccgact

SEQ ID NO: 14348 - DNA, 18 bp, Artificial Sequence
  Description of Artificial Sequence: Synthetic oligonucleotide
ttcggttagtttgtgcgt

SEQ ID NO: 14349 - DNA, 21 bp, Artificial Sequence
  Description of Artificial Sequence: Synthetic oligonucleotide
taaacgacacgcaattcctac

SEQ ID NO: 14350 - DNA, 21 bp, Artificial Sequence
  Description of Artificial Sequence: Synthetic oligonucleotide
ctaataaataaacccgaccga

SEQ ID NO: 14351 - DNA, 17 bp, Artificial Sequence
  Description of Artificial Sequence: Synthetic oligonucleotide
ttcgttgtttcggggta

SEQ ID NO: 14352 - DNA, 18 bp, Artificial Sequence
  Description of Artificial Sequence: Synthetic oligonucleotide
ttgagttacggtgttcgt

SEQ ID NO: 14353 - DNA, 19 bp, Artificial Sequence
  Description of Artificial Sequence: Synthetic oligonucleotide
gacacgcaattcctacgat

SEQ ID NO: 14354 - DNA, 19 bp, Artificial Sequence
  Description of Artificial Sequence: Synthetic oligonucleotide
ttcggattcggagattttg

SEQ ID NO: 14355 - DNA, 21 bp, Artificial Sequence
  Description of Artificial Sequence: Synthetic oligonucleotide
gttattcggttagtttgtgcg

SEQ ID NO: 14356 - DNA, 19 bp, Artificial Sequence
  Description of Artificial Sequence: Synthetic oligonucleotide
ctacgacataaaacccgac

SEQ ID NO: 14357 - DNA, 19 bp, Artificial Sequence
  Description of Artificial Sequence: Synthetic oligonucleotide
gttggtgatattcgcggag

SEQ ID NO: 14358 - DNA, 16 bp, Artificial Sequence
  Description of Artificial Sequence: Synthetic oligonucleotide
ttggtgatattcgcgg

SEQ ID NO: 14359 - DNA, 18 bp, Artificial Sequence
  Description of Artificial Sequence: Synthetic oligonucleotide
ttggtgatattcgcggag

SEQ ID NO: 14360 - DNA, 20 bp, Artificial Sequence
  Description of Artificial Sequence: Synthetic oligonucleotide
ttattcggttagtttgtgcg

SEQ ID NO: 14361 - DNA, 22 bp, Artificial Sequence
  Description of Artificial Sequence: Synthetic oligonucleotide
aactacgaaaaccgactaaaat

SEQ ID NO: 14362 - DNA, 22 bp, Artificial Sequence
  Description of Artificial Sequence: Synthetic oligonucleotide
atttattttttggagggtgtga

SEQ ID NO: 14363 - DNA, 19 bp, Artificial Sequence
  Description of Artificial Sequence: Synthetic oligonucleotide
aacgacacgcaattcctac

SEQ ID NO: 14364 - DNA, 25 bp, Artificial Sequence
  Description of Artificial Sequence: Synthetic oligonucleotide
ataaataactacgacataaaacccg

SEQ ID NO: 14365 - DNA, 21 bp, Artificial Sequence
  Description of Artificial Sequence: Synthetic oligonucleotide
tacgaaaaccgactaaaatct

SEQ ID NO: 14366 - DNA, 20 bp, Artificial Sequence
  Description of Artificial Sequence: Synthetic oligonucleotide
caattcctacgattcgacaa

SEQ ID NO: 14367 - DNA, 18 bp, Artificial Sequence
  Description of Artificial Sequence: Synthetic oligonucleotide
tcggttagtttgtgcgtt

SEQ ID NO: 14368 - DNA, 22 bp, Artificial Sequence
  Description of Artificial Sequence: Synthetic oligonucleotide
tcgattcgtaaattgttgtatt

SEQ ID NO: 14369 - DNA, 21 bp, Artificial Sequence
  Description of Artificial Sequence: Synthetic oligonucleotide
ctaaacttactccgaaccgtc

SEQ ID NO: 14370 - DNA, 22 bp, Artificial Sequence
  Description of Artificial Sequence: Synthetic oligonucleotide
agcgtttttttcgagatttcgg

SEQ ID NO: 14371 - DNA, 19 bp, Artificial Sequence
  Description of Artificial Sequence: Synthetic oligonucleotide
agttagtttgttgggagag

SEQ ID NO: 14372 - DNA, 22 bp, Artificial Sequence
  Description of Artificial Sequence: Synthetic oligonucleotide
ttcgattcgtaaattgttgtat

SEQ ID NO: 14373 - DNA, 22 bp, Artificial Sequence
  Description of Artificial Sequence: Synthetic oligonucleotide
attcgattcgtaaattgttgta

SEQ ID NO: 14374 - DNA, 21 bp, Artificial Sequence
  Description of Artificial Sequence: Synthetic oligonucleotide
ctctaaacttactccgaaccg

SEQ ID NO: 14375 - DNA, 22 bp, Artificial Sequence
  Description of Artificial Sequence: Synthetic oligonucleotide
cgattcgtaaattgttgtattt

SEQ ID NO: 14376 - DNA, 21 bp, Artificial Sequence
  Description of Artificial Sequence: Synthetic oligonucleotide
taaaacgactaactcgaccct

SEQ ID NO: 14377 - DNA, 16 bp, Artificial Sequence
  Description of Artificial Sequence: Synthetic oligonucleotide
gagcgggacggttcgg

SEQ ID NO: 14378 - DNA, 17 bp, Artificial Sequence
  Description of Artificial Sequence: Synthetic oligonucleotide
gtttagaggtagaggag

SEQ ID NO: 14379 - DNA, 20 bp, Artificial Sequence
  Description of Artificial Sequence: Synthetic oligonucleotide
tctaaacttactccgaaccg

SEQ ID NO: 14380 - DNA, 20 bp, Artificial Sequence
  Description of Artificial Sequence: Synthetic oligonucleotide
taaacttactccgaaccgtc

SEQ ID NO: 14381 - DNA, 20 bp, Artificial Sequence
  Description of Artificial Sequence: Synthetic oligonucleotide
acgactaactcgaccctttt

SEQ ID NO: 14382 - DNA, 20 bp, Artificial Sequence
  Description of Artificial Sequence: Synthetic oligonucleotide
aaacgactaactcgaccctt

SEQ ID NO: 14383 - DNA, 20 bp, Artificial Sequence
  Description of Artificial Sequence: Synthetic oligonucleotide
aaaacgactaactcgaccct

SEQ ID NO: 14384 - DNA, 20 bp, Artificial Sequence
  Description of Artificial Sequence: Synthetic oligonucleotide
aacgactaactcgacccttt

SEQ ID NO: 14385 - DNA, 22 bp, Artificial Sequence
  Description of Artificial Sequence: Synthetic oligonucleotide
tctaaacttactccgaaccgtc

SEQ ID NO: 14386 - DNA, 23 bp, Artificial Sequence
  Description of Artificial Sequence: Synthetic oligonucleotide
ttcgattcgtaaattgttgtatt

SEQ ID NO: 14387 - DNA, 20 bp, Artificial Sequence
  Description of Artificial Sequence: Synthetic oligonucleotide
cggagggtacggagattacg

SEQ ID NO: 14388 - DNA, 15 bp, Artificial Sequence
  Description of Artificial Sequence: Synthetic oligonucleotide
cgacgacgcgcgaaa

SEQ ID NO: 14389 - DNA, 29 bp, Artificial Sequence
  Description of Artificial Sequence: Synthetic oligonucleotide
cgaaaccctaaatatcccgaataacgccg

SEQ ID NO: 14390 - DNA, 25 bp, Artificial Sequence
  Description of Artificial Sequence: Synthetic oligonucleotide
tggtgatggaggaggtttagtaagt

SEQ ID NO: 14391 - DNA, 27 bp, Artificial Sequence
  Description of Artificial Sequence: Synthetic oligonucleotide
aaccaataaaacctactcctcccttaa

SEQ ID NO: 14392 - DNA, 30 bp, Artificial Sequence
  Description of Artificial Sequence: Synthetic oligonucleotide
accaccacccaacacacaataacaaacaca

SEQ ID NO: 14393 - DNA, 25 bp, Artificial Sequence
  Description of Artificial Sequence: Synthetic oligonucleotide
ggtgattgtttattgttatggtttg

SEQ ID NO: 14394 - DNA, 23 bp, Artificial Sequence
  Description of Artificial Sequence: Synthetic oligonucleotide
cccctcaacctaaaaactacaac

SEQ ID NO: 14395 - DNA, 25 bp, Artificial Sequence
  Description of Artificial Sequence: Synthetic oligonucleotide
gttatggtttgtgattttgtgtggg

SEQ ID NO: 14396 - DNA, 26 bp, Artificial Sequence
  Description of Artificial Sequence: Synthetic oligonucleotide
aaactacaaccactcaaatcaaccca

SEQ ID NO: 14397 - DNA, 25 bp, Artificial Sequence
  Description of Artificial Sequence: Synthetic oligonucleotide
aaaattacgacgacgccacccgaaa

SEQ ID NO: 14398 - DNA, 26 bp, Artificial Sequence
  Description of Artificial Sequence: Synthetic oligonucleotide
tgggattaagattttcggttagtttc

SEQ ID NO: 14399 - DNA, 23 bp, Artificial Sequence
  Description of Artificial Sequence: Synthetic oligonucleotide
cactacaacgctacgcgactaaa

SEQ ID NO: 14400 - DNA, 32 bp, Artificial Sequence
  Description of Artificial Sequence: Synthetic oligonucleotide
tcgacgttacccaaacgaatcacataaaaaac

SEQ ID NO: 14401 - DNA, 26 bp, Artificial Sequence
  Description of Artificial Sequence: Synthetic oligonucleotide
tggataggagttgggattaagatttt

SEQ ID NO: 14402 - DNA, 33 bp, Artificial Sequence
  Description of Artificial Sequence: Synthetic oligonucleotide
cttattacaatttaaaaaaaaaattcactacaa

SEQ ID NO: 14403 - DNA, 39 bp, Artificial Sequence
  Description of Artificial Sequence: Synthetic oligonucleotide
aaattcactacaacactacacaactaaattcaacattac

SEQ ID NO: 14404 - DNA, 32 bp, Artificial Sequence
  Description of Artificial Sequence: Synthetic oligonucleotide
ttttcgtattttttttcgggttattacgtttt

SEQ ID NO: 14405 - DNA, 25 bp, Artificial Sequence
  Description of Artificial Sequence: Synthetic oligonucleotide
atgtgattcgtttgggtaacgtcga

SEQ ID NO: 14406 - DNA, 21 bp, Artificial Sequence
  Description of Artificial Sequence: Synthetic oligonucleotide
tttttttttcggacgtcgttg

SEQ ID NO: 14407 - DNA, 20 bp, Artificial Sequence
  Description of Artificial Sequence: Synthetic oligonucleotide
cctctacatacgccgcgaat

SEQ ID NO: 14408 - DNA, 22 bp, Artificial Sequence
  Description of Artificial Sequence: Synthetic oligonucleotide
aattaccgaaaacatcgaccga

SEQ ID NO: 14409 - DNA, 27 bp, Artificial Sequence
  Description of Artificial Sequence: Synthetic oligonucleotide
gtagggttattgtttgggttaataaat

SEQ ID NO: 14410 - DNA, 30 bp, Artificial Sequence
  Description of Artificial Sequence: Synthetic oligonucleotide
taaaaaaaaaaaaaaaactcctctacatac

SEQ ID NO: 14411 - DNA, 29 bp, Artificial Sequence
  Description of Artificial Sequence: Synthetic oligonucleotide
aactcctctacatacaccacaaataaatt

SEQ ID NO: 14412 - DNA, 22 bp, Artificial Sequence
  Description of Artificial Sequence: Synthetic oligonucleotide
cgaaaacatcgaccgaacaacg

SEQ ID NO: 14413 - DNA, 25 bp, Artificial Sequence
  Description of Artificial Sequence: Synthetic oligonucleotide
gtccgaaaaaaaaaaaacgaactcc

SEQ ID NO: 14414 - DNA, 21 bp, Artificial Sequence
  Description of Artificial Sequence: Synthetic oligonucleotide
ggacgttttttatcgaaggcg

SEQ ID NO: 14415 - DNA, 15 bp, Artificial Sequence
  Description of Artificial Sequence: Synthetic oligonucleotide
gccacccaaccgcga

SEQ ID NO: 14416 - DNA, 22 bp, Artificial Sequence
  Description of Artificial Sequence: Synthetic oligonucleotide
acccgaaatcacgcgcgaaaaa

SEQ ID NO: 14417 - DNA, 26 bp, Artificial Sequence
  Description of Artificial Sequence: Synthetic oligonucleotide
gacggatttttttttaacgttttttc

SEQ ID NO: 14418 - DNA, 22 bp, Artificial Sequence
  Description of Artificial Sequence: Synthetic oligonucleotide
aaataaaataccacctccgcga

SEQ ID NO: 14419 - DNA, 24 bp, Artificial Sequence
  Description of Artificial Sequence: Synthetic oligonucleotide
gctcctcgcgaaatactcaccccg

SEQ ID NO: 14420 - DNA, 33 bp, Artificial Sequence
  Description of Artificial Sequence: Synthetic oligonucleotide
gttagttagttaattttttaaatagattagtag

SEQ ID NO: 14421 - DNA, 27 bp, Artificial Sequence
  Description of Artificial Sequence: Synthetic oligonucleotide
caaaaaaacaaataaaataccacctcc

SEQ ID NO: 14422 - DNA, 30 bp, Artificial Sequence
  Description of Artificial Sequence: Synthetic oligonucleotide
cctccacaaaactcactcctcacaaaatac

SEQ ID NO: 14423 - DNA, 29 bp, Artificial Sequence
  Description of Artificial Sequence: Synthetic oligonucleotide
tttcgttttgtatggtagatacggggtga

SEQ ID NO: 14424 - DNA, 36 bp, Artificial Sequence
  Description of Artificial Sequence: Synthetic oligonucleotide
attaatggttttataagacggatttttttttaacgt

SEQ ID NO: 14425 - DNA, 17 bp, Homo sapiens
tggacgcaggaaagcga

SEQ ID NO: 14426 - DNA, 20 bp, Homo sapiens
acccacgggagtcccatcgc

SEQ ID NO: 14427 - DNA, 17 bp, Homo sapiens
actagtccgggtcgcgt

SEQ ID NO: 14428 - DNA, 18 bp, Homo sapiens
cacacgaaagggaggcgg

SEQ ID NO: 14429 - DNA, 18 bp, Homo sapiens
ggcgtgtcgccagcctta

SEQ ID NO: 14430 - DNA, 18 bp, Homo sapiens
tccgactgacgtcagcga

SEQ ID NO: 14431 - DNA, 16 bp, Homo sapiens
cttcgagtctgacggc

SEQ ID NO: 14432 - DNA, 16 bp, Homo sapiens
cccggagggcgcacct

SEQ ID NO: 14433 - DNA, 16 bp, Homo sapiens
catccctggcagcagc

SEQ ID NO: 14434 - DNA, 17 bp, Homo sapiens
taacaaagtaaaaaatt

SEQ ID NO: 14435 - DNA, 16 bp, Homo sapiens
tggaccagactggtga

SEQ ID NO: 14436 - DNA, 16 bp, Homo sapiens
gatcatgcaagtcgat

SEQ ID NO: 14437 - DNA, 16 bp, Homo sapiens
tgtaaattataataaa

SEQ ID NO: 14438 - DNA, 16 bp, Homo sapiens
agctaagcacttcact

SEQ ID NO: 14439 - DNA, 17 bp, Homo sapiens
gtgctccgaagtatctt

SEQ ID NO: 14440 - DNA, 18 bp, Homo sapiens
gcaactatccccctcctc

SEQ ID NO: 14441 - DNA, 16 bp, Homo sapiens
cagtccaggggtctgc

SEQ ID NO: 14442 - DNA, 16 bp, Homo sapiens
ccggacgtcaacaacc

SEQ ID NO: 14443 - DNA, 16 bp, Homo sapiens
cacgcagttgcgcgct

SEQ ID NO: 14444 - DNA, 16 bp, Homo sapiens
aaccggcggccaggat

SEQ ID NO: 14445 - DNA, 16 bp, Homo sapiens
tctgaccgggcttgag

SEQ ID NO: 14446 - DNA, 18 bp, Homo sapiens
cctgagcactcgcaggaa

SEQ ID NO: 14447 - DNA, 16 bp, Homo sapiens
agaggcgcgggttaca

SEQ ID NO: 14448 - DNA, 18 bp, Homo sapiens
ctagcggccaagctgcga

SEQ ID NO: 14449 - DNA, 20 bp, Homo sapiens
ggtcgacgaggaggtgcaag

SEQ ID NO: 14450 - DNA, 16 bp, Homo sapiens
acgtgggaagaggcag

SEQ ID NO: 14451 - DNA, 17 bp, Homo sapiens
ccgcccgcatccctctg

SEQ ID NO: 14452 - DNA, 17 bp, Homo sapiens
tggccggcatatttcga

SEQ ID NO: 14453 - DNA, 16 bp, Homo sapiens
ggaggttccggttcga

SEQ ID NO: 14454 - DNA, 16 bp, Homo sapiens
ccagcggcaacagcgg

SEQ ID NO: 14455 - DNA, 21 bp, Artificial Sequence
  Description of Artificial Sequence: Synthetic oligonucleotide
tttttttttcggacgtcgttg

SEQ ID NO: 14456 - DNA, 20 bp, Artificial Sequence
  Description of Artificial Sequence: Synthetic oligonucleotide
cctctacatacgccgcgaat

SEQ ID NO: 14457 - DNA, 22 bp, Artificial Sequence
  Description of Artificial Sequence: Synthetic oligonucleotide
aattaccgaaaacatcgaccga

SEQ ID NO: 14458 - DNA, 20 bp, Artificial Sequence
  Description of Artificial Sequence: Synthetic oligonucleotide
gacgggggttctggacttac

SEQ ID NO: 14459 - DNA, 19 bp, Artificial Sequence
  Description of Artificial Sequence: Synthetic oligonucleotide
ccagtccctggatgttgct

SEQ ID NO: 14460 - DNA, 20 bp, Artificial Sequence
  Description of Artificial Sequence: Synthetic oligonucleotide
gctaagccggagtcaccaag

SEQ ID NO: 14461 - DNA, 19 bp, Artificial Sequence
  Description of Artificial Sequence: Synthetic oligonucleotide
cgctgagaccgagaagaag

SEQ ID NO: 14462 - DNA, 18 bp, Artificial Sequence
  Description of Artificial Sequence: Synthetic oligonucleotide
gccgacgagaccaaggag

SEQ ID NO: 14463 - DNA, 19 bp, Artificial Sequence
  Description of Artificial Sequence: Synthetic oligonucleotide
atgagcagcgtgaagacga

SEQ ID NO: 14464 - DNA, 19 bp, Artificial Sequence
  Description of Artificial Sequence: Synthetic oligonucleotide
cgtgccatcccaagagttt

SEQ ID NO: 14465 - DNA, 19 bp, Artificial Sequence
  Description of Artificial Sequence: Synthetic oligonucleotide
atgaccctggctttggtgt

SEQ ID NO: 14466 - DNA, 19 bp, Artificial Sequence
  Description of Artificial Sequence: Synthetic oligonucleotide
cgcagtaagaggcgacaac

SEQ ID NO: 14467 - DNA, 18 bp, Artificial Sequence
  Description of Artificial Sequence: Synthetic oligonucleotide
aaggggtctacgggcact

SEQ ID NO: 14468 - DNA, 19 bp, Artificial Sequence
  Description of Artificial Sequence: Synthetic oligonucleotide
tctggaaggaggacgtgaa

SEQ ID NO: 14469 - DNA, 18 bp, Artificial Sequence
  Description of Artificial Sequence: Synthetic oligonucleotide
aaggggtctacgggcact

SEQ ID NO: 14470 - DNA, 19 bp, Artificial Sequence
  Description of Artificial Sequence: Synthetic oligonucleotide
gttgaagtcgcccaggaac

SEQ ID NO: 14471 - DNA, 18 bp, Artificial Sequence
  Description of Artificial Sequence: Synthetic oligonucleotide
agtggggcaccgacgtaa

SEQ ID NO: 14472 - DNA, 20 bp, Artificial Sequence
  Description of Artificial Sequence: Synthetic oligonucleotide
ccattttacttggggtgtgg

SEQ ID NO: 14473 - DNA, 21 bp, Artificial Sequence
  Description of Artificial Sequence: Synthetic oligonucleotide
ctggagctgtcaggagaaaag

SEQ ID NO: 14474 - DNA, 18 bp, Artificial Sequence
  Description of Artificial Sequence: Synthetic oligonucleotide
gtcgccccctacccttct

SEQ ID NO: 14475 - DNA, 21 bp, Artificial Sequence
  Description of Artificial Sequence: Synthetic oligonucleotide
cccaagaccttaacccaagtc

SEQ ID NO: 14476 - DNA, 20 bp, Artificial Sequence
  Description of Artificial Sequence: Synthetic oligonucleotide
ctccaaacgcgataccctct

SEQ ID NO: 14477 - DNA, 20 bp, Artificial Sequence
  Description of Artificial Sequence: Synthetic oligonucleotide
gtgactcctccccttccttc

SEQ ID NO: 14478 - DNA, 20 bp, Artificial Sequence
  Description of Artificial Sequence: Synthetic oligonucleotide
gccttaactgctggggtctt

SEQ ID NO: 14479 - DNA, 20 bp, Artificial Sequence
  Description of Artificial Sequence: Synthetic oligonucleotide
gatggagatggctgaagtgg

SEQ ID NO: 14480 - DNA, 19 bp, Artificial Sequence
  Description of Artificial Sequence: Synthetic oligonucleotide
gtccatcggtttcgtctcc

SEQ ID NO: 14481 - DNA, 21 bp, Artificial Sequence
  Description of Artificial Sequence: Synthetic oligonucleotide
ccaccgtgtagaagttgtcgt

SEQ ID NO: 14482 - DNA, 17 bp, Artificial Sequence
  Description of Artificial Sequence: Synthetic oligonucleotide
agggcgttttgttggcg

SEQ ID NO: 14483 - DNA, 21 bp, Artificial Sequence
  Description of Artificial Sequence: Synthetic oligonucleotide
ctacaacctaaacgacgcgct

SEQ ID NO: 14484 - DNA, 21 bp, Artificial Sequence
  Description of Artificial Sequence: Synthetic oligonucleotide
atcggcgttttagcgtgcggg

SEQ ID NO: 14485 - DNA, 25 bp, Artificial Sequence
  Description of Artificial Sequence: Synthetic oligonucleotide
aaaaaaaaaaaactcctctacatac

SEQ ID NO: 14486 - DNA, 24 bp, Artificial Sequence
  Description of Artificial Sequence: Synthetic oligonucleotide
ggttattgtttgggttaataaatg

SEQ ID NO: 14487 - DNA, 38 bp, Artificial Sequence
  Description of Artificial Sequence: Synthetic oligonucleotide
acatacaccacaaataaattaccaaaaacatcaaccaa

SEQ ID NO: 14488 - DNA, 21 bp, Artificial Sequence
  Description of Artificial Sequence: Synthetic oligonucleotide
ttttttttttcggacgtcgtt

SEQ ID NO: 14489 - DNA, 20 bp, Artificial Sequence
  Description of Artificial Sequence: Synthetic oligonucleotide
tcggtcgatgttttcggtaa

SEQ ID NO: 14490 - DNA, 17 bp, Artificial Sequence
  Description of Artificial Sequence: Synthetic oligonucleotide
acggcgttttggttcgt

SEQ ID NO: 14491 - DNA, 27 bp, Artificial Sequence
  Description of Artificial Sequence: Synthetic oligonucleotide
cgacttaataacgacgtacgcgaaccc

SEQ ID NO: 14492 - DNA, 26 bp, Artificial Sequence
  Description of Artificial Sequence: Synthetic oligonucleotide
gtcatctaacaacgacctaactaacg

SEQ ID NO: 14493 - DNA, 21 bp, Artificial Sequence
  Description of Artificial Sequence: Synthetic oligonucleotide
ctctaaaccgcgaaaactccg

SEQ ID NO: 14494 - DNA, 21 bp, Artificial Sequence
  Description of Artificial Sequence: Synthetic oligonucleotide
cgcgtttgttcgggtttcggg

SEQ ID NO: 14495 - DNA, 23 bp, Artificial Sequence
  Description of Artificial Sequence: Synthetic oligonucleotide
gggatgagaggttgttgacgttc

SEQ ID NO: 14496 - DNA, 17 bp, Artificial Sequence
  Description of Artificial Sequence: Synthetic oligonucleotide
agggcgttttgttggcg

SEQ ID NO: 14497 - DNA, 21 bp, Artificial Sequence
  Description of Artificial Sequence: Synthetic oligonucleotide
atcggcgttttagcgtgcggg

SEQ ID NO: 14498 - DNA, 21 bp, Artificial Sequence
  Description of Artificial Sequence: Synthetic oligonucleotide
ctacaacctaaacgacgcgct

SEQ ID NO: 14499 - DNA, 20 bp, Artificial Sequence
  Description of Artificial Sequence: Synthetic oligonucleotide
gaggtttcggttcgaggttc

SEQ ID NO: 14500 - DNA, 36 bp, Artificial Sequence
  Description of Artificial Sequence: Synthetic oligonucleotide
acgtcacaaaaaaaaaacccacgtaataataacgaa

SEQ ID NO: 14501 - DNA, 22 bp, Artificial Sequence
  Description of Artificial Sequence: Synthetic oligonucleotide
ctttactacaacgaaaacgccg

SEQ ID NO: 14502 - DNA, 28 bp, Artificial Sequence
  Description of Artificial Sequence: Synthetic oligonucleotide
gattaaaaaatttgtttttattcggtcg

SEQ ID NO: 14503 - DNA, 23 bp, Artificial Sequence
  Description of Artificial Sequence: Synthetic oligonucleotide
cgcggaagtagagtaggcgggcg

SEQ ID NO: 14504 - DNA, 19 bp, Artificial Sequence
  Description of Artificial Sequence: Synthetic oligonucleotide
tccgcttcgaaaacctcga

SEQ ID NO: 14505 - DNA, 22 bp, Artificial Sequence
  Description of Artificial Sequence: Synthetic oligonucleotide
caaaatccgtcgacgataaaac

SEQ ID NO: 14506 - DNA, 22 bp, Artificial Sequence
  Description of Artificial Sequence: Synthetic oligonucleotide
tcgggttggggttcgtattcgg

SEQ ID NO: 14507 - DNA, 31 bp, Artificial Sequence
  Description of Artificial Sequence: Synthetic oligonucleotide
acgtagttataggttttgatagttttaggga

SEQ ID NO: 14508 - DNA, 24 bp, Artificial Sequence
  Description of Artificial Sequence: Synthetic oligonucleotide
gaacgcgaaaaaattaacatctcg

SEQ ID NO: 14509 - DNA, 35 bp, Artificial Sequence
  Description of Artificial Sequence: Synthetic oligonucleotide
tttcgtttttatcgtggtgggtatgttcgtgttta

SEQ ID NO: 14510 - DNA, 23 bp, Artificial Sequence
  Description of Artificial Sequence: Synthetic oligonucleotide
tttcgggattgttgttggtgttt

SEQ ID NO: 14511 - DNA, 34 bp, Artificial Sequence
  Description of Artificial Sequence: Synthetic oligonucleotide
catcaatatcctaatcataacctactatctatcg

SEQ ID NO: 14512 - DNA, 23 bp, Artificial Sequence
  Description of Artificial Sequence: Synthetic oligonucleotide
taggtttagtcgcgcgttcgcga

SEQ ID NO: 14513 - DNA, 23 bp, Artificial Sequence
  Description of Artificial Sequence: Synthetic oligonucleotide
gagatggggaattttttgacgtc

SEQ ID NO: 14514 - DNA, 29 bp, Artificial Sequence
  Description of Artificial Sequence: Synthetic oligonucleotide
cttaaaataataacgcgaaatataacgct

SEQ ID NO: 14515 - DNA, 27 bp, Artificial Sequence
  Description of Artificial Sequence: Synthetic oligonucleotide
cgaaaaacgatcgaaatcccgactttc

SEQ ID NO: 14516 - DNA, 19 bp, Artificial Sequence
  Description of Artificial Sequence: Synthetic oligonucleotide
tttgcggaaagacgtcgtt

SEQ ID NO: 14517 - DNA, 19 bp, Artificial Sequence
  Description of Artificial Sequence: Synthetic oligonucleotide
ccaaaaatacgcgaccacg

SEQ ID NO: 14518 - DNA, 38 bp, Artificial Sequence
  Description of Artificial Sequence: Synthetic oligonucleotide
ctaaaccactaatattcgacgtaattctccgtatttac

SEQ ID NO: 14519 - DNA, 23 bp, Artificial Sequence
  Description of Artificial Sequence: Synthetic oligonucleotide
cgttttttcgtattcggaaagac

SEQ ID NO: 14520 - DNA, 18 bp, Artificial Sequence
  Description of Artificial Sequence: Synthetic oligonucleotide
tacgtgtgaggggttcgc

SEQ ID NO: 14521 - DNA, 31 bp, Artificial Sequence
  Description of Artificial Sequence: Synthetic oligonucleotide
ccaatcgaaactatccaaatacgataaccga

SEQ ID NO: 14522 - DNA, 26 bp, Artificial Sequence
  Description of Artificial Sequence: Synthetic oligonucleotide
ccaataaaaattcgtaaaaaaaaacg

SEQ ID NO: 14523 - DNA, 17 bp, Artificial Sequence
  Description of Artificial Sequence: Synthetic oligonucleotide
cggttagtcggaggcgc

SEQ ID NO: 14524 - DNA, 29 bp, Artificial Sequence
  Description of Artificial Sequence: Synthetic oligonucleotide
cgaacgaaacaacctaaacgaaaaccccg

SEQ ID NO: 14525 - DNA, 21 bp, Artificial Sequence
  Description of Artificial Sequence: Synthetic oligonucleotide
ccaaaataaccaatcgacccg

SEQ ID NO: 14526 - DNA, 17 bp, Artificial Sequence
  Description of Artificial Sequence: Synthetic oligonucleotide
cggttagtcggaggcgc

SEQ ID NO: 14527 - DNA, 29 bp, Artificial Sequence
  Description of Artificial Sequence: Synthetic oligonucleotide
cgaacgaaacaacctaaacgaaaaccccg

SEQ ID NO: 14528 - DNA, 21 bp, Artificial Sequence
  Description of Artificial Sequence: Synthetic oligonucleotide
ccaaaataaccaatcgacccg

SEQ ID NO: 14529 - DNA, 17 bp, Artificial Sequence
  Description of Artificial Sequence: Synthetic oligonucleotide
gggttagggtgggtcgc

SEQ ID NO: 14530 - DNA, 19 bp, Artificial Sequence
  Description of Artificial Sequence: Synthetic oligonucleotide
cgtcggcgtgggcgatgtc

SEQ ID NO: 14531 - DNA, 16 bp, Artificial Sequence
  Description of Artificial Sequence: Synthetic oligonucleotide
gactcccgccccaacg

SEQ ID NO: 14532 - DNA, 20 bp, Artificial Sequence
  Description of Artificial Sequence: Synthetic oligonucleotide
cggagggtacggagattacg

SEQ ID NO: 14533 - DNA, 29 bp, Artificial Sequence
  Description of Artificial Sequence: Synthetic oligonucleotide
cgaaaccctaaatatcccgaataacgccg

SEQ ID NO: 14534 - DNA, 15 bp, Artificial Sequence
  Description of Artificial Sequence: Synthetic oligonucleotide
cgacgacgcgcgaaa

SEQ ID NO: 14535 - DNA, 19 bp, Artificial Sequence
  Description of Artificial Sequence: Synthetic oligonucleotide
cgtacgaacgcaacaaccg

SEQ ID NO: 14536 - DNA, 18 bp, Artificial Sequence
  Description of Artificial Sequence: Synthetic oligonucleotide
gttcggcgttgtttaggc

SEQ ID NO: 14537 - DNA, 21 bp, Artificial Sequence
  Description of Artificial Sequence: Synthetic oligonucleotide
gcatcttccaacaccgtcccg

SEQ ID NO: 14538 - DNA, 19 bp, Artificial Sequence
  Description of Artificial Sequence: Synthetic oligonucleotide
ctccgcatccttccccgaa

SEQ ID NO: 14539 - DNA, 20 bp, Artificial Sequence
  Description of Artificial Sequence: Synthetic oligonucleotide
ccgaacaaacgtaatacgcg

SEQ ID NO: 14540 - DNA, 16 bp, Artificial Sequence
  Description of Artificial Sequence: Synthetic oligonucleotide
acggcgtgaaggagcg

SEQ ID NO: 14541 - DNA, 20 bp, Artificial Sequence
  Description of Artificial Sequence: Synthetic oligonucleotide
tacgcgcggtagtcgtgcgc

SEQ ID NO: 14542 - DNA, 19 bp, Artificial Sequence
  Description of Artificial Sequence: Synthetic oligonucleotide
cgacaaaatcctcatcgcg

SEQ ID NO: 14543 - DNA, 20 bp, Artificial Sequence
  Description of Artificial Sequence: Synthetic oligonucleotide
gtcgtttagcgttgggaagc

SEQ ID NO: 14544 - DNA, 34 bp, Artificial Sequence
  Description of Artificial Sequence: Synthetic oligonucleotide
tacgtacgagtttcgtacgcgtattatttcgtcg

SEQ ID NO: 14545 - DNA, 20 bp, Artificial Sequence
  Description of Artificial Sequence: Synthetic oligonucleotide
acttaaaaatcgccgaatcg

SEQ ID NO: 14546 - DNA, 32 bp, Artificial Sequence
  Description of Artificial Sequence: Synthetic oligonucleotide
agttttatagttaattagggtagttgtcgtcg

SEQ ID NO: 14547 - DNA, 21 bp, Artificial Sequence
  Description of Artificial Sequence: Synthetic oligonucleotide
tcctatcatcgctcacgaacg

SEQ ID NO: 14548 - DNA, 27 bp, Artificial Sequence
  Description of Artificial Sequence: Synthetic oligonucleotide
cgacaacgactatccttactattataa

SEQ ID NO: 14549 - DNA, 23 bp, Artificial Sequence
  Description of Artificial Sequence: Synthetic oligonucleotide
ggtgttgtttattttagagagtt

SEQ ID NO: 14550 - DNA, 17 bp, Artificial Sequence
  Description of Artificial Sequence: Synthetic oligonucleotide
cctaacccctatccttc

SEQ ID NO: 14551 - DNA, 29 bp, Artificial Sequence
  Description of Artificial Sequence: Synthetic oligonucleotide
ccttcaccaccttcccaacactacaacac

SEQ ID NO: 14552 - DNA, 18 bp, Artificial Sequence
  Description of Artificial Sequence: Synthetic oligonucleotide
tcggcgtcggtcgttagg

SEQ ID NO: 14553 - DNA, 22 bp, Artificial Sequence
  Description of Artificial Sequence: Synthetic oligonucleotide
cgcgggagtagttagatgcgtc

SEQ ID NO: 14554 - DNA, 20 bp, Artificial Sequence
  Description of Artificial Sequence: Synthetic oligonucleotide
tgagagagagagggttgaaa

SEQ ID NO: 14555 - DNA, 24 bp, Artificial Sequence
  Description of Artificial Sequence: Synthetic oligonucleotide
tctaaataacaaaatacctccatt

SEQ ID NO: 14556 - DNA, 16 bp, Artificial Sequence
  Description of Artificial Sequence: Synthetic oligonucleotide
cgacccgccaaccgac

SEQ ID NO: 14557 - DNA, 15 bp, Artificial Sequence
  Description of Artificial Sequence: Synthetic oligonucleotide
cgccgaaacgcgctc

SEQ ID NO: 14558 - DNA, 27 bp, Artificial Sequence
  Description of Artificial Sequence: Synthetic oligonucleotide
ccattaccaacacaacccaccaaccaa

SEQ ID NO: 14559 - DNA, 25 bp, Artificial Sequence
  Description of Artificial Sequence: Synthetic oligonucleotide
aaaaaaaaaaaactcctctacatac

SEQ ID NO: 14560 - DNA, 24 bp, Artificial Sequence
  Description of Artificial Sequence: Synthetic oligonucleotide
ggttattgtttgggttaataaatg

SEQ ID NO: 14561 - DNA, 38 bp, Artificial Sequence; identical to SEQ ID NO: 14487
  Description of Artificial Sequence: Synthetic oligonucleotide

SEQ ID NO: 14562 - DNA, 21 bp, Artificial Sequence
  Description of Artificial Sequence: Synthetic oligonucleotide
ttttttttttcggacgtcgtt

SEQ ID NO: 14563 - DNA, 20 bp, Artificial Sequence
  Description of Artificial Sequence: Synthetic oligonucleotide
tcggtcgatgttttcggtaa

SEQ ID NO: 14564 - DNA, 25 bp, Artificial Sequence
  Description of Artificial Sequence: Synthetic oligonucleotide
aaaaaaaaaaaactcctctacatac

SEQ ID NO: 14565 - DNA, 24 bp, Artificial Sequence
  Description of Artificial Sequence: Synthetic oligonucleotide
ggttattgtttgggttaataaatg

SEQ ID NO: 14566 - DNA, 36 bp, Artificial Sequence
  Description of Artificial Sequence: Synthetic oligonucleotide
ctctacatacaccacaaataaattaccaaaaacatc

SEQ ID NO: 14567 - DNA, 24 bp, Artificial Sequence
  Description of Artificial Sequence: Synthetic oligonucleotide
cgcgaataaattaccgaaaacatc

SEQ ID NO: 14568 - DNA, 17 bp, Artificial Sequence
  Description of Artificial Sequence: Synthetic oligonucleotide
accgaacaacgacgtcc

SEQ ID NO: 14569 - DNA, 21 bp, Artificial Sequence
  Description of Artificial Sequence: Synthetic oligonucleotide
gaggtgttagaggagtagtag

SEQ ID NO: 14570 - DNA, 17 bp, Artificial Sequence
  Description of Artificial Sequence: Synthetic oligonucleotide
tccccctacaacctaaa

SEQ ID NO: 14571 - DNA, 37 bp, Artificial Sequence
  Description of Artificial Sequence: Synthetic oligonucleotide
acctaaacaacacactcccacacactaaaacaccaat

SEQ ID NO: 14572 - DNA, 15 bp, Artificial Sequence
  Description of Artificial Sequence: Synthetic oligonucleotide
cgagtcggcgcggga

SEQ ID NO: 14573 - DNA, 20 bp, Artificial Sequence
  Description of Artificial Sequence: Synthetic oligonucleotide
agggcgttttgttggcgatc

SEQ ID NO: 14574 - DNA, 28 bp, Artificial Sequence
  Description of Artificial Sequence: Synthetic oligonucleotide
ctatccatatacctaactaattaataac

SEQ ID NO: 14575 - DNA, 32 bp, Artificial Sequence
  Description of Artificial Sequence: Synthetic oligonucleotide
gtaaagtttttaatttttattagtattagtat

SEQ ID NO: 14576 - DNA, 43 bp, Artificial Sequence
  Description of Artificial Sequence: Synthetic oligonucleotide
ctaattaataacacttaaaacacaattataaacaccaccatac

SEQ ID NO: 14577 - DNA, 40 bp, Artificial Sequence
  Description of Artificial Sequence: Synthetic oligonucleotide
atttagttaaagtttatgtcgattatagttacgttagttt

SEQ ID NO: 14578 - DNA, 20 bp, Artificial Sequence
  Description of Artificial Sequence: Synthetic oligonucleotide
gtgaacggtttcgtcgggag

SEQ ID NO: 14579 - DNA, 23 bp, Artificial Sequence
  Description of Artificial Sequence: Synthetic oligonucleotide
gttttattgtatgatgaattgga

SEQ ID NO: 14580 - DNA, 21 bp, Artificial Sequence
  Description of Artificial Sequence: Synthetic oligonucleotide
caccaaaaaaatattaaccac

SEQ ID NO: 14581 - DNA, 39 bp, Artificial Sequence
  Description of Artificial Sequence: Synthetic oligonucleotide
ttaaccacaacacaaataaaaccaaacaaattatccata

SEQ ID NO: 14582 - DNA, 26 bp, Artificial Sequence
  Description of Artificial Sequence: Synthetic oligonucleotide
gttttttcgcgttcgtcgtttatttt

SEQ ID NO: 14583 - DNA, 23 bp, Artificial Sequence
  Description of Artificial Sequence: Synthetic oligonucleotide
ttgggtcgacgagattaaggagg

SEQ ID NO: 14584 - DNA, 21 bp, Artificial Sequence
  Description of Artificial Sequence: Synthetic oligonucleotide
gagaggtttattaaggtaggg

SEQ ID NO: 14585 - DNA, 28 bp, Artificial Sequence
  Description of Artificial Sequence: Synthetic oligonucleotide
ctactaccaaaaataaaaaattattaac

SEQ ID NO: 14586 - DNA, 39 bp, Artificial Sequence
  Description of Artificial Sequence: Synthetic oligonucleotide
aaaattattaacatccaacacatttatccaaacttcaaa

SEQ ID NO: 14587 - DNA, 26 bp, Artificial Sequence
  Description of Artificial Sequence: Synthetic oligonucleotide
gtttaggggtttgtagagaagttcga

SEQ ID NO: 14588 - DNA, 17 bp, Artificial Sequence
  Description of Artificial Sequence: Synthetic oligonucleotide
tcggataaacgcgtcgg

SEQ ID NO: 14589 - DNA, 24 bp, Artificial Sequence
  Description of Artificial Sequence: Synthetic oligonucleotide
gagttgagagaatttttaaatttt

SEQ ID NO: 14590 - DNA, 21 bp, Artificial Sequence
  Description of Artificial Sequence: Synthetic oligonucleotide
tcttctaaaacaaaaaacacc

SEQ ID NO: 14591 - DNA, 26 bp, Artificial Sequence
  Description of Artificial Sequence: Synthetic oligonucleotide
caccactacaatccaaacaacccaaa

SEQ ID NO: 14592 - DNA, 20 bp, Artificial Sequence
  Description of Artificial Sequence: Synthetic oligonucleotide
ggacgtcgagcgttgggtat

SEQ ID NO: 14593 - DNA, 20 bp, Artificial Sequence
  Description of Artificial Sequence: Synthetic oligonucleotide
aggacgcgtagttggacggt

SEQ ID NO: 14594 - DNA, 18 bp, Artificial Sequence
  Description of Artificial Sequence: Synthetic oligonucleotide
gaaggaagggaaagtttt

SEQ ID NO: 14595 - DNA, 20 bp, Artificial Sequence
  Description of Artificial Sequence: Synthetic oligonucleotide
taaaaaaaacactaccctac

SEQ ID NO: 14596 - DNA, 37 bp, Artificial Sequence
  Description of Artificial Sequence: Synthetic oligonucleotide
ctaccacaataaaaacccaaaacactccttcacacca

SEQ ID NO: 14597 - DNA, 20 bp, Artificial Sequence
  Description of Artificial Sequence: Synthetic oligonucleotide
acccgaaacgctccttcacg

SEQ ID NO: 14598 - DNA, 26 bp, Artificial Sequence
  Description of Artificial Sequence: Synthetic oligonucleotide
cgtaaacaaacgaaacgacgactacg

SEQ ID NO: 14599 - DNA, 28 bp, Artificial Sequence
  Description of Artificial Sequence: Synthetic oligonucleotide
cacaaactatctataaaaaattaatctc

SEQ ID NO: 14600 - DNA, 23 bp, Artificial Sequence
  Description of Artificial Sequence: Synthetic oligonucleotide
gattgttgttggtgtttgttatt

SEQ ID NO: 14601 - DNA, 47 bp, Artificial Sequence
  Description of Artificial Sequence: Synthetic oligonucleotide
ctcaaacacaaaaaaattaacatctcatctcttaaaccactttcaat

SEQ ID NO: 14602 - DNA, 22 bp, Artificial Sequence
  Description of Artificial Sequence: Synthetic oligonucleotide
tcgtctcttaaaccgctttcga

SEQ ID NO: 14603 - DNA, 25 bp, Artificial Sequence
  Description of Artificial Sequence: Synthetic oligonucleotide
cctcaaaataaacacgaacataccc

SEQ ID NO: 14604 - DNA, 24 bp, Artificial Sequence
  Description of Artificial Sequence: Synthetic oligonucleotide
atacaaaatacaaaaataccttct

SEQ ID NO: 14605 - DNA, 22 bp, Artificial Sequence
  Description of Artificial Sequence: Synthetic oligonucleotide
atttggttttattttggttatg

SEQ ID NO: 14606 - DNA, 36 bp, Artificial Sequence
  Description of Artificial Sequence: Synthetic oligonucleotide
accttctcacaaatcaactaaaacacacacaacacc

SEQ ID NO: 14607 - DNA, 18 bp, Artificial Sequence
  Description of Artificial Sequence: Synthetic oligonucleotide
tggatttagggcgtcgcg

SEQ ID NO: 14608 - DNA, 21 bp, Artificial Sequence
  Description of Artificial Sequence: Synthetic oligonucleotide
cgttcgtttattaagcggcga

SEQ ID NO: 14609 - DNA, 25 bp, Artificial Sequence
  Description of Artificial Sequence: Synthetic oligonucleotide
aaaaaaaaaaaactcctctacatac

SEQ ID NO: 14610 - DNA, 24 bp, Artificial Sequence
  Description of Artificial Sequence: Synthetic oligonucleotide
ggttattgtttgggttaataaatg

SEQ ID NO: 14611 - DNA, 20 bp, Artificial Sequence
  Description of Artificial Sequence: Synthetic oligonucleotide
acatacaccacaaataaatt

SEQ ID NO: 14612 - DNA, 18 bp, Artificial Sequence
  Description of Artificial Sequence: Synthetic oligonucleotide
accaaaaacatcaaccaa

SEQ ID NO: 14613 - DNA, 21 bp, Artificial Sequence
  Description of Artificial Sequence: Synthetic oligonucleotide
ttttttttttcggacgtcgtt

SEQ ID NO: 14614 - DNA, 20 bp, Artificial Sequence
  Description of Artificial Sequence: Synthetic oligonucleotide
tcggtcgatgttttcggtaa

SEQ ID NO: 14615 - DNA, 16 bp, Artificial Sequence
  Description of Artificial Sequence: Synthetic oligonucleotide
ggtttgggatggttgt

SEQ ID NO: 14616 - DNA, 24 bp, Artificial Sequence
  Description of Artificial Sequence: Synthetic oligonucleotide
tctaaataacaaaatacctccatt

SEQ ID NO: 14617 - DNA, 27 bp, Artificial Sequence
  Description of Artificial Sequence: Synthetic oligonucleotide
ccattaccaacacaacccaccaaccaa

SEQ ID NO: 14618 - DNA, 20 bp, Artificial Sequence
  Description of Artificial Sequence: Synthetic oligonucleotide
ggtcgcggtgagagagagag

SEQ ID NO: 14619 - DNA, 21 bp, Artificial Sequence
  Description of Artificial Sequence: Synthetic oligonucleotide
tgaaattagagcgcgtttcgg

SEQ ID NO: 14620 - DNA, 23 bp, Artificial Sequence
  Description of Artificial Sequence: Synthetic oligonucleotide
ggtgttgtttattttagagagtt

SEQ ID NO: 14621 - DNA, 17 bp, Artificial Sequence
  Description of Artificial Sequence: Synthetic oligonucleotide
cctaacccctatccttc

SEQ ID NO: 14622 - DNA, 29 bp, Artificial Sequence
  Description of Artificial Sequence: Synthetic oligonucleotide
ccttcaccaccttcccaacactacaacac

SEQ ID NO: 14623 - DNA, 19 bp, Artificial Sequence
  Description of Artificial Sequence: Synthetic oligonucleotide
tggggtttcggcgaagtaa

SEQ ID NO: 14624 - DNA, 18 bp, Artificial Sequence
  Description of Artificial Sequence: Synthetic oligonucleotide
tttttcggcgtcggtcgt

SEQ ID NO: 14625 - DNA, 26 bp, Artificial Sequence
  Description of Artificial Sequence: Synthetic oligonucleotide
gggattaagattttcggttagtttcg

SEQ ID NO: 14626 - DNA, 34 bp, Artificial Sequence
  Description of Artificial Sequence: Synthetic oligonucleotide
caaacgaatcacataaaaaacgtaataacccgaa

SEQ ID NO: 14627 - DNA, 22 bp, Artificial Sequence
  Description of Artificial Sequence: Synthetic oligonucleotide
aacgctacgcgactaaattcga
